United States Patent Application Publication US 2005/0020813 A1 - sequence listing, part 2

SEQ ID NO: 4307 - DNA, 1482 bp, Streptococcus pneumoniae
atgacattagtttatcaatcaacgcgtgatgccaacaatacagtaactgccagccaagcaattttgcaaggtttggcgacggacggcggtttgtttacaccggatacttatccaaaggtagatttgaactttgacaaattgaaagatgcttcttaccaggaagttgctaagctagttttgtcagcatttttagatgactttacagttgaggagttggactactgtatcaacaatgcctacgatagcaaatttgatactccagctattgcaccattagtgaaattagatgggcaatacaatttggaacttttccatggttcaacgattgcctttaaggatatggccttgtctattttgccatactttatgacgactgctgctaagaaacatggtttggagaacaagattgttatcttgacagcgacatctggtgacacggggaaagctgctatggcggggtttgcgaatgtgcctggtactgagattatcgtcttttatccaaaggatggtgtcagcaagattcaagagttacaaatgaccactcagactggcgacaatactcatgttattgctattgatggtaactttgacgatgcgcaaacaaatgtgaagcacatgtttaacgacgtggctcttcgtgaaaaattgactaccaacaagttgcaattttcatcagctaactctatgaacattggtcgtctggtgccacaaattgtttattatgtttatgcttacgctcaattggttaagactggtgaaattgtagctggtgaaaaggttaacttcacagtaccaacaggaaactttggaaatatcttggctgccttttatgccaaacaaattggtttgccagttggtaaattaatctgtgcttcaaatgacaacaatgttttgacagacttctttaaaacacgtgtctatgacaaaaaacgtgagtttaaggtaacaaccagcccatctatggatatcttggtatcttcaaacttggagcgcttgattttccatcttttgggaaataatgctgaaaagacaactgaacttatgaatgccttgaacacgcaaggacaatataagttgacagactttgatgcagagattttggacctctttgcagctgaatatgcgactgaggaagaaacggcagcagagatcaagcgtgtttgtgagttagattcttatatcgaggaccctcatacagctgttgcttcagcagtttataaaaaataccaatcggccactggagatgtaactaagacagtgattgcttcaacagctagtccatacaagttcccagtagttgcagtagaagctgtaactggaaaagcaggtttaacagactttgaagccttggctcaattacatgaaatctcaggcgttgcagtgccaccagcagttgatgggcttgaaatagctccaattcgtcacaagacaacagtggcagctgctgacatgcaagcagcggttgaggcttatttaggactt

SEQ ID NO: 4308 - protein, 494 aa, Streptococcus pneumoniae
  threonine synthase (thrC); Cellular location: cytoplasm; Similar to strain R6 sequence 15903919 (0.E+01)
MTLVYQSTRDANNTVTASQAILQGLATDGGLFTPDTYPKVDLNFDKLKDASYQEVAKLVLSAFLDDFTVEELDYCINNAYDSKFDTPAIAPLVKLDGQYNLELFHGSTIAFKDMALSILPYFMTTAAKKHGLENKIVILTATSGDTGKAAMAGFANVPGTEIIVFYPKDGVSKIQELQMTTQTGDNTHVIAIDGNFDDAQTNVKHMFNDVALREKLTTNKLQFSSANSMNIGRLVPQIVYYVYAYAQLVKTGEIVAGEKVNFTVPTGNFGNILAAFYAKQIGLPVGKLICASNDNNVLTDFFKTRVYDKKREFKVTTSPSMDILVSSNLERLIFHLLGNNAEKTTELMNALNTQGQYKLTDFDAEILDLFAAEYATEEETAAEIKRVCELDSYIEDPHTAVASAVYKKYQSATGDVTKTVIASTASPYKFPVVAVEAVTGKAGLTDFEALAQLHEISGVAVPPAVDGLEIAPIRHKTTVAAADMQAAVEAYLGL

SEQ ID NO: 4309 - DNA, 1275 bp, Streptococcus pneumoniae
atgtcttgttctatcgatttattaaaacatcggtatttgaaaaatattaaagaaaatcctgaattgtttgtcggaattgagttggagtatcctgttgcaagtttagaaggggatgctacagatgttgaagttatgaaggatctatttcattatttagtttctactttggatctcaccgtagcaaaggtagatgattttggcaatctgatccagttagtagatccgataagtcaggatgctattttatttgaagtttcctatacaacgattgagtttgcatttggtaaggctgaaacgattcaagaggtcgaaaatcgtttcaataattatatgaatgtaattcagagaaagttagctgaatcaaatcatgctattgttggctgtggtatccatcccaactgggataaaaatgagaattgtccagtggcttatccacgctatcagatgttgatggattatttgaatttgagtagaaatattattaaatcagatttacatcatttccctgaatatggtacttttatctgtgggagccaggttcagctggatatttcaaaaaccaactacttacgggtgattaatgcttttactcaaattgaagcggctaaggcttatttatttgcaaactctgaattttcgggtgcggattgggatacgaaaatttcaagggatattttctgggaagaatctatgcatggtatctatccagagaatgttggggtcaatgctagactccttaatgatgaaactgatttttttgactatctaaatcattctgcgatttttactgcggaacgtgatgggcagacctattatttttatcctattcaggctggggactatttggctacgtccgaaatccaagcatttgctctgaatggggatgaggttattatttacccccaagagaaggattttgaaactcatcgtagttaccagtaccaagatttaacgactcgaggaacagttgagtttcgtagtgtgtgtacacagccacttgataggacttttgcttctgcagcttttcacttgggattattggttaatttagacaagttagaagcttacttagaaacagcacctttctttaaagtatttggttatgattacaagtctttaaggagacaattttctaagaaaaatcttacagatgaggaagaaactacgattattgaattttccaaagacttactcctactagctgaggagggactagtggtgagaaataaggaagaaatgacctatttacagcctttgagagaagaattgagccta

SEQ ID NO: 4310 - protein, 425 aa, Streptococcus pneumoniae
  hypothetical protein; Cellular location: cytoplasm; Similar to strain R6 sequence 15903920 (0.E+01)
MSCSIDLLKHRYLKNIKENPELFVGIELEYPVASLEGDATDVEVMKDLFHYLVSTLDLTVAKVDDFGNLIQLVDPISQDAILFEVSYTTIEFAFGKAETIQEVENRFNNYMNVIQRKLAESNHAIVGCGIHPNWDKNENCPVAYPRYQMLMDYLNLSRNIIKSDLHHFPEYGTFICGSQVQLDISKTNYLRVINAFTQIEAAKAYLFANSEFSGADWDTKISRDIFWEESMHGIYPENVGVNARLLNDETDFFDYLNHSAIFTAERDGQTYYFYPIQAGDYLATSEIQAFALNGDEVIIYPQEKDFETHRSYQYQDLTTRGTVEFRSVCTQPLDRTFASAAFHLGLLVNLDKLEAYLETAPFFKVFGYDYKSLRRQFSKKNLTDEEETTIIEFSKDLLLLAEEGLVVRNKEEMTYLQPLREELSL

SEQ ID NO: 4311 - DNA, 432 bp, Streptococcus pneumoniae
atggacatctgggaaaagatgtacgaagaagcacagaaactatacaatccacatgaagtatcagactttgtttatgccaatcatgttgtagctgcagtagaagcaggagatggacaaatatttacaggattctgtatggagggaacctgtggtgttttccatctctgcgcagaacgggcggccctcttcaatatgtaccaattttcaggacaaactaaggttaagaaagtattagcctttcgagacaaaccaccttatggtggaagttcagccatgccttgcggtgcttgtagagaattccttttagagcttaatgctgaaaataaagatgcagaattcatgatggactataatataagaaaaacagttaaagtcgcagaactaatcccttattggtggggaaaagaacgtgcttctaagtttaatgagcga

SEQ ID NO: 4312 - protein, 144 aa, Streptococcus pneumoniae
  cytidine/deoxycytidylate deaminase family protein; Cellular location: cytoplasm; Similar to strain R6 sequence 15903921 (1.E-83)
MDIWEKMYEEAQKLYNPHEVSDFVYANHVVAAVEAGDGQIFTGFCMEGTCGVFHLCAERAALFNMYQFSGQTKVKKVLAFRDKPPYGGSSAMPCGACREFLLELNAENKDAEFMMDYNIRKTVKVAELIPYWWGKERASKFNER

SEQ ID NO: 4313 - DNA, 1458 bp, Streptococcus pneumoniae
atgtcaaaagatatccgcgtacgttacgcaccaagtccaacaggactactacacatcggaaatgctcgtacagcattgtttaattacttgtatgcgcgccatcatggtggaacatttctcatccgtatcgaagatactgaccgtaaacgccatgtcgaggatggtgaacgttcacaacttgaaaaccttcgctggttaggcatggattgggatgaaagtccagaatcacatgagaattatcgccagtctgagcgtttggacttgtatcaaaaatatattgaccaactattagctgaaggaaaagcctataaatcttacgttacagaagaagagttggcagctgaacgcgaacgccaagaagtagctggcgaaacaccacgctacatcaatgaataccttggtatgagtgaagaagaaaaagcagcttacatcgcagaacgtgaagcagcagggatcatcccaactgttcgtttggctgtcaatgagtcaggtatctacaagtggcatgatatggtcaaaggcgatatcgaatttgaaggtggcaatatcggtggtgactgggttatccaaaagaaagacggttacccaacttacaactttgccgttgttatcgatgaccacgatatgcaaatctctcatgttatccgtggagatgaccatattgctaatacaccaaaacagcttatggtctatgaagctcttggttgggaagctccagagttcggtcacatgaccttgattatcaactctgaaactggtaagaagttatctaaacgtgatactaatacacttcaatttatcgaagattaccgaaagaaaggttaccttccagaagcagtctttaactttattgctcttcttggttggaacccaggtggtgaagatgagattttctctcgtgaagaattcattaaactttttgatgaaaaccgcctcagcaagtcaccagcagcctttgatcagaaaaaactagactggatgagcaatgattatatcaagaatgcagaccttgaaaccatctttgaaatggcaaaaccattcttagaggaagcaggccgtttgactgacaaggctgaaaaattagttgagctctataaaccacaaatgaaatcagtagatgagattatcccattgacagatcttttcttctcagatttcccagaattgacagaagcagagcgcgaagtcatgacgggtgaaacagttccaacagttcttgaagcattcaaagcaaaacttgaagcgatgacagatgatgaatttgtgacagaaaatatcttcccacaaattaaagcagtccaaaaagaaacaggtattaaagggaaaaatcttttcatgcctattcgtatcgcagtttcaggcgaaatgcatgggccagaattaccagatacaattttcttgcttggacgtgaaaaatcaattcagcatatcgaaaacatgctaaaagaaatctctaaa

SEQ ID NO: 4314 - protein, 486 aa, Streptococcus pneumoniae
  glutamyl-tRNA synthetase (gltX); Cellular location: cytoplasm; Similar to strain R6 sequence 15903922 (0.E+01)
MSKDIRVRYAPSPTGLLHIGNARTALFNYLYARHHGGTFLIRIEDTDRKRHVEDGERSQLENLRWLGMDWDESPESHENYRQSERLDLYQKYIDQLLAEGKAYKSYVTEEELAAERERQEVAGETPRYINEYLGMSEEEKAAYIAEREAAGIIPTVRLAVNESGIYKWHDMVKGDIEFEGGNIGGDWVIQKKDGYPTYNFAVVIDDHDMQISHVIRGDDHIANTPKQLMVYEALGWEAPEFGHMTLIINSETGKKLSKRDTNTLQFIEDYRKKGYLPEAVFNFIALLGWNPGGEDEIFSREEFIKLFDENRLSKSPAAFDQKKLDWMSNDYIKNADLETIFEMAKPFLEEAGRLTDKAEKLVELYKPQMKSVDEIIPLTDLFFSDFPELTEAEREVMTGETVPTVLEAFKAKLEAMTDDEFVTENIFPQIKAVQKETGIKGKNLFMPIRIAVSGEMHGPELPDTIFLLGREKSIQHIENMLKEISK

SEQ ID NO: 4315 - DNA, 1347 bp, Streptococcus pneumoniae
atgtcacatattaaatttgattattcaaaagttttagacaaatttgttgcaccacatgaagtggaatacatgcaatcacaagtaacagcagcagatgaattaatccgtaaaggaactggtgctggtagcgacttcttgggatggttggaccttcctgaaaaatacgaccgcgaagaatttgaccgcatcttgaaagctgctgagcaaatcaagtcagacagcgatgttttggttgtgatcggtattggtggatcttaccttggtgcaaaagcagcaatcgacttcttgaatcaccattttgctaacttgcaaacaaaagaagaacgcaaagctccacaaatcctttacgcaggaaactcaatctcatctacttaccttgctgacttggtagagtatgttgcagacaaagacttctcagtaaacgtaatttctaaatcaggtacaacaactgaaccagcgattgctttccgtgtctttaaagaactcttggttaagaaatacggtcaagaagaagctaacaaacgtatctatgcaacaactgaccgccaaaagggtgctgttaaggttgaagcagacgctaacggttggggaacatttgttgttccagatgatatcggtggacgcttctcagtattgacagccgttggtttgctttcaatcgcagcatcaggagctgacataaaagctcttatggaaggtgcgaatgcagctcgcaaagactacacttcagacaaaatctctgaaaacgaagcttaccaatacgcagctgttcgtaacatcctttatcgtaaaggctatgcaactgagatcttggtaaactatgagccatcacttcaatacttctcagaatggtggaaacaattggctggtgaatcagaaggaaaagaccaaaaaggtatctacccaacttcagccaacttctcaactgacttgcactcacttggtcaatttatccaagaaggaactcgtatcatgtttgaaacagttgtccgtgttgacaaacctcgtaaaaacgtgcttattcctactttggaagaagaccttgacggacttggttaccttcaaggaaaagacgttgactttgtaaacaaaaaagcaactgacggtgttcttcttgcccacacagatggtgatgtaccaaacatgtatgtgactcttccagagcaagacgctttcactcttggttacactatctacttcttcgaattggcaattgccctttcaggttacttgaatgctatcaacccatttgaccaaccaggtgttgaagcttataaacgtaacatgtttgcccttcttggaaaaccaggatttgaagaattgagcaaagaacttaacgcacgtcta

SEQ ID NO: 4316 - protein, 449 aa, Streptococcus pneumoniae
  glucose-6-phosphate isomerase (pgi); Cellular location: membrane; Similar to strain R6 sequence 15903923 (0.E+01)
MSHIKFDYSKVLDKFVAPHEVEYMQSQVTAADELIRKGTGAGSDFLGWLDLPEKYDREEFDRILKAAEQIKSDSDVLVVIGIGGSYLGAKAAIDFLNHHFANLQTKEERKAPQILYAGNSISSTYLADLVEYVADKDFSVNVISKSGTTTEPAIAFRVFKELLVKKYGQEEANKRIYATTDRQKGAVKVEADANGWGTFVVPDDIGGRFSVLTAVGLLSIAASGADIKALMEGANAARKDYTSDKISENEAYQYAAVRNILYRKGYATEILVNYEPSLQYFSEWWKQLAGESEGKDQKGIYPTSANFSTDLHSLGQFIQEGTRIMFETVVRVDKPRKNVLIPTLEEDLDGLGYLQGKDVDFVNKKATDGVLLAHTDGDVPNMYVTLPEQDAFTLGYTIYFFELAIALSGYLNAINPFDQPGVEAYKRNMFALLGKPGFEELSKELNARL

SEQ ID NO: 4317 - DNA, 177 bp, Streptococcus pneumoniae
ttggaacatctggtcgttctttcttttattttttcaaaatttttagaatgtggcattttacgcaaacgtttgaattctgataaaaattggagaaattcgacaaaaaaacttgaaaaaaacgaaggtaagcgttatgatagaaaagaagaaatattggaggaagaacatgtcacatat

SEQ ID NO: 4318 - protein, 59 aa, Streptococcus pneumoniae
  conserved domain protein; Cellular location: membrane; Similar to strain R6 sequence 15903924 (8.E-31)
MEHLVVLSFIFSKFLECGILRKRLNSDKNWRNSTKKLEKNEGKRYDRKEEILEEEHVTY

SEQ ID NO: 4319 - DNA, 726 bp, Streptococcus pneumoniae
atgataggactatcgttagcattcgaaaggagaggcatcatggctagaacggttgtaggagttgctgcaaatctatgtcccgtagacgcagaaggcaaaatcattcattcatctgtatcttgtagattcgcagagatcattcgtcaagtcggtggtctccctttagtcattcctgttggtgatgagtcagttgtacgtgattatgtggaaatgattgacaaactcattttgacaggaggccaaaatgttcatcctcagttttatggagagaaaaagaccgtcgagagcgatgattacaatctggtccgtgacgaatttgaattggcactcttgaaggaagcgcttcgtcagaataaaccaattatggcaatctgtcgcggtgtccaacttgtcaatgttgcctttggtggaaccctcaatcaagaaatcgaaggtcactggcaaggactacctttcgggacatctcactctattgagacagtagaaggaagcgtggtggctaagctatttgggaaagaaagtcaggtcaactcagtccatcgtcaaagcattaaagatttggcacctaatttccgtgtaactgctattgattcaagagaccaaactattgaagcgattgagtctatcgacgagcaccgcattatcggtttacagtggcatccagagtttctggttaatgaagaagatggcaatttagaattatttgagtatttattgaatgaactg

SEQ ID NO: 4320 - protein, 242 aa, Streptococcus pneumoniae
  glutamine amidotransferase, class-I; Cellular location: cytoplasm; Similar to strain R6 sequence 15903925 (e-137)
MIGLSLAFERRGIMARTVVGVAANLCPVDAEGKIIHSSVSCRFAEIIRQVGGLPLVIPVGDESVVRDYVEMIDKLILTGGQNVHPQFYGEKKTVESDDYNLVRDEFELALLKEALRQNKPIMAICRGVQLVNVAFGGTLNQEIEGHWQGLPFGTSHSIETVEGSVVAKLFGKESQVNSVHRQSIKDLAPNFRVTAIDSRDQTIEAIESIDEHRIIGLQWHPEFLVNEEDGNLELFEYLLNEL

SEQ ID NO: 4321 - DNA, 1809 bp, Streptococcus pneumoniae
ttggcagtagctaactgcgctaaatataatataaggaggagtaaaatgaagacagttcaatttttttggcattattttaaggtctacaagttctcatttgtagttgtcatcctgatgattgttctggcgacttttgcccaagccctctttccagtcttttctggacaagcggtgacgcagctagccaatttagttcaagcttatcaaaatggcaatccagaacttgtatggcaaagcctatcaggaatcatggtcaatcttggcctgctggttttggttctatttatctctagtgtaatatacatgtgtctcatgacgcgcgtgattgcagaatcgaccaacgagatgcgcaaaggcctctttggtaagcttgctcagttgacggtttctttctttgaccgtcgacaagatggcgatatcctgtctcattttaccagtgatttggataatatcctccaagcctttaacgaaagcttgattcaggtcatgagcaatattgttttatacattggtctgattcttgtcatgttttcgagaaatgtgacgctggctctcatcaccattgccagcaccccattggctttccttatgctgattttcatcgtgaaaatggcacgcaaatacaccaacctccagcagaaagaggtagggaagctcaacgcctatatggatgagagcatctcaggccaaaaagccgtgattgtgcaaggaattcaagaggatatgatggcaggatttcttgaacaaaatgagcgcgtgcgcaaggcaacctttaaaggaagaatgttctcaggaattcttttccctgtcatgaatgggatgagcctgattaatacagccatcgtcatctttgctggttcggctgtacttttgaatgataagtctattgaaacaagtacagccctaggtttgattgttatgtttgcacaattttcacagcagtactaccagcctattatccaagttgcagcgagttggggaagccttcagttggcctttactggagctgaacgaattcaggaaatgtttgatgcagaggaggaaatccgacctgaaaaggctccaaccttcactaagttgcaagaaagtgttgaaatcagtcatatcgttttttcatacttgcctgataaacctattttgaaagatgtcagcatttctgcccctaaaggccagatgacagcagttgttgggccgacaggttcaggaaaaacgactattatgaacctcatcaatcgcttttatgatgttgatgctggtggtatttattttgatggtaaagacattcgtggctatgacttagatagtcttagaagcaaggtgggaattgtattgcaagattcggtcttgtttagcggaacgattagagacaatatccgatttggtgtgccagatgctagtcaggaaatggttgaggtagcagcaaaagcaacccacattcacgactatatcgaaagtttgcctgataagtacgatactcttattgatgatgaccagagcatcttttcaacagggcagaagcaattgatttcaatcgctcgaaccctgatgacagatccagaagttctcattctcgatgaagcaacttcaaacgtagatacggtgacagaaagcaagattcagcatgccatggaggtggttgtagcaggtagaactagtttcgtcattgcccaccgcttgaaaaccattctcaatgcagatcagattattgtccttaaagatggagaagtcattgaacgtggtaaccaccatgaacttttgaagctaggtggcttttattcagaactctatcacaatcaatttgttttcgaa

SEQ ID NO: 4322 - protein, 603 aa, Streptococcus pneumoniae
  ABC transporter, ATP-binding/permease protein; Cellular location: membrane; Similar to strain R6 sequence 15903926 (0.E+01)
MAVANCAKYNIRRSKMKTVQFFWHYFKVYKFSFVVVILMIVLATFAQALFPVFSGQAVTQLANLVQAYQNGNPELVWQSLSGIMVNLGLLVLVLFISSVIYMCLMTRVIAESTNEMRKGLFGKLAQLTVSFFDRRQDGDILSHFTSDLDNILQAFNESLIQVMSNIVLYIGLILVMFSRNVTLALITIASTPLAFLMLIFIVKMARKYTNLQQKEVGKLNAYMDESISGQKAVIVQGIQEDMMAGFLEQNERVRKATFKGRMFSGILFPVMNGMSLINTAIVIFAGSAVLLNDKSIETSTALGLIVMFAQFSQQYYQPIIQVAASWGSLQLAFTGAERIQEMFDAEEEIRPEKAPTFTKLQESVEISHIVFSYLPDKPILKDVSISAPKGQMTAVVGPTGSGKTTIMNLINRFYDVDAGGIYFDGKDIRGYDLDSLRSKVGIVLQDSVLFSGTIRDNIRFGVPDASQEMVEVAAKATHIHDYIESLPDKYDTLIDDDQSIFSTGQKQLISIARTLMTDPEVLILDEATSNVDTVTESKIQHAMEVVVAGRTSFVIAHRLKTILNADQIIVLKDGEVIERGNHHELLKLGGFYSELYHNQFVFE

SEQ ID NO: 4323 - DNA, 207 bp, Streptococcus pneumoniae
atggctgagttcaactcggtcatcacgacggttactgggattggggatcgtttaggggcggtcattttagctgagattcgaaatattcatgcctttgataatcctgctcaattacaagctttcgctggactggattcttctatttatcagtcagatcagattgatttagcaggaagaatggtcaaacggagttcccctcatctgcgg

SEQ ID NO: 4324 - protein, 69 aa, Streptococcus pneumoniae
  transposase, IS116/IS110/IS902 family, degenerate
MAEFNSVITTVTGIGDRLGAVILAEIRNIHAFDNPAQLQAFAGLDSSIYQSDQIDLAGRMVKRSSPHLR

SEQ ID NO: 4325 - DNA, 1638 bp, Streptococcus pneumoniae
atgacaggcttgatggttgctagttcacttctgcaaccgcgttatctgcaggaagtcttaggcgccctccttactgggaaatatgaagctatttatagtatcggggcttggttgattggtgtggccgtagtcggtctagttgctggtggactcaatgttgtcctcgcagcctatattgcccaaggagtttcatccgaccttcgggaggatgccttccgtaaaattcaaaccttttcttatgctgatattgaacaatttaatgcgggaaatctagtcgttcgaatgacaaatgatatcaaccagattcagaacgttgtcatgatgaccttccaaattcttttcagacttcccctcttgttcatcggttcgtttatcctagcggttcaaaccttaccttctctgtggtgggtgattgttctcatggtagtcttgatttttggtttgactgctgtcatgatgggaatgatggggcctcgttttgccaagtttcaaacccttcttgagcgcatcaatgccattgccaaggaaaatttacgtggcgttcgtgtggtcaagtcctttgtccaagaaaaagagcaatttgctaagtttacagaggtctcagacgagcttcttggtcaaaacctttacattggttatgccttttcagtagtggaaccctttatgatgttggttggttacggggcggtcttcctctctatttggctggtcgcgggaatggttcagtcggatccgtctgttgttggttccatcgcttcttttgttaattacctaagccagattatctttaccattgttatggttggatttttgggaaattctgtcagccgtgccatgatttccatgcgtcgtattcgagaaattcttgacgcagagccagctatgaccttcaaggatatcccagatgaagagttggttggaagtcttagctttgaaaatgtgacctttacctatccaatggacaaggaaccgatgctgaaagatgtgagctttactattgaacctggtcaaatggttggtgtagttggagcgactggtgcaggaaagtcaaccttggctcaattgattccacgtctctttgatccacaggacggggccattaaaatcggtggcaaggatattcgagaagtgagtgaaggaaccctgcgtaaaacagtttccatcgttctccaacgtgccattctttttagtggaacgattgcagataacttgagacaggggaaggggaatgctactctatttgaaatggagcgcgcagccaatattgcccaggctagtgaattcattcatcgtatggagaaaacctttgaaagtccagttgaagaacggggaaccaatttctctggtggacaaaaacaaaggatgtcgattgcgcgtgggattgtcagcaatccacgtattctgatttttgatgattcgacctcagccttggatgccaaatcagagcgcttggtgcaagaagctttgaataaggacttgaaggggacgacaaccattattattgctcaaaaaattagctcggttgtccatgcagacaagatcttggttctaaatcaaggacgattgattggtcaaggtacgcatgcagacttggttgccaacaatgccgtttaccgtgaaatctatgaaacacagaaa

SEQ ID NO: 4326 - protein, 546 aa, Streptococcus pneumoniae
  ABC transporter, ATP-binding/permease protein; Cellular location: membrane; Similar to strain R6 sequence 15903928 (0.E+01)
MTGLMVASSLLQPRYLQEVLGALLTGKYEAIYSIGAWLIGVAVVGLVAGGLNVVLAAYIAQGVSSDLREDAFRKIQTFSYADIEQFNAGNLVVRMTNDINQIQNVVMMTFQILFRLPLLFIGSFILAVQTLPSLWWVIVLMVVLIFGLTAVMMGMMGPRFAKFQTLLERINAIAKENLRGVRVVKSFVQEKEQFAKFTEVSDELLGQNLYIGYAFSVVEPFMMLVGYGAVFLSIWLVAGMVQSDPSVVGSIASFVNYLSQIIFTIVMVGFLGNSVSRAMISMRRIREILDAEPAMTFKDIPDEELVGSLSFENVTFTYPMDKEPMLKDVSFTIEPGQMVGVVGATGAGKSTLAQLIPRLFDPQDGAIKIGGKDIREVSEGTLRKTVSIVLQRAILFSGTIADNLRQGKGNATLFEMERAANIAQASEFIHRMEKTFESPVEERGTNFSGGQKQRMSIARGIVSNPRILIFDDSTSALDAKSERLVQEALNKDLKGTTTIIIAQKISSVVHADKILVLNQGRLIGQGTHADLVANNAVYREIYETQK

SEQ ID NO: 4327 - DNA, 111 bp, Streptococcus pneumoniae
ttgtcgctcccttttgtctattttttaaggagaaagtatgctgattcagaaaataaaaacctacaagtggcaggccctggcttcgctcctgatgacaggcttgatggttgc

SEQ ID NO: 4328 - protein, 37 aa, Streptococcus pneumoniae
  hypothetical protein FRAMESHIFT
MSLPFVYFLRRKYADSENKNLQVAGPGFAPDDRLDGC

SEQ ID NO: 4329 - DNA, 228 bp, Streptococcus pneumoniae
ttgccagcagaccttttagcaagggcggataagattttgactcagctagagaatcaaggaacagagagtcctcctcccatgagacaaactagtgctgtcactgaacagatttcactctttgatagggcagaagagcatcctatcctagcagaattagctaaactggatgtgtataatatgacacctatgcaggttatgaatgtcttagtagagttaaaacagaaacta

SEQ ID NO: 4330 - protein, 76 aa, Streptococcus pneumoniae
  DNA mismatch repair protein hexa-related
MPADLLARADKILTQLENQGTESPPPMRQTSAVTEQISLFDRAEEHPILAELAKLDVYNMTPMQVMNVLVELKQKL

SEQ ID NO: 4331 - DNA, 2358 bp, Streptococcus pneumoniae
ttgctctcaagacttatttttgaaaaggagagacagaaaatggcgatagaaaagttatcacccggcatgcaacagtatgtggatattaaaaagcaatatccagatgcttttttgctctttcggatgggtgatttttatgaattattttatgaggatgcggtcaatgctgcgcagattctggaaatttccttaacgagtcgcaacaagaatgccgacaatccgatccctatggcgggtgttccctatcattctgcccaacagtatatcgatgtcttgattgagcagggttataaggtggctatcgcagagcagatggaagatcctaaacaagcagttggggttgttaaacgagaggttgttcaggtcattacgccagggacagtggtcgatagcagtaagccggacagtcagaataattttttggtttccatagaccgcgaaggcaatcaatttggcctagcttatatggatttggtgacgggtgacttttatgtgacaggtcttttggatttcacgctggtttgtggggaaatccgtaacctcaaggctcgagaagtggtgttgggttatgacttgtctgaggaagaagaacaaatcctcagccgccagatgaatctggtactctcttatgaaaaagaaagctttgaagaccttcatttattggatttgcgattggcaacggtggagcaaacggcatctagtaagctgctccagtatgttcatcggactcagatgagggaattgaaccacctcaaacctgttatccgctacgaaattaaggatttcttgcagatggattatgcgaccaaggctagtctggatttggttgagaatgctcgctcaggtaagaaacaaggcagtcttttctggcttttggatgaaaccaaaacggctatggggatgcgtctcttgcgttcttggattcatcgccccttgattgataaggaacgaatcgtccaacgtcaagaagtagtgcaggtctttctcgaccatttctttgagcgtagtgacttgacagacagtctcaagggtgtttatgacattgagcgcttggctagtcgtgtttcttttggcaaaaccaatccaaaggatctcttgcagttggcgactaccttgtctagtgtgccacggattcgtgcgattttagaagggatggagcaacctactctagcctatctcatcgcacaactggatgcaatccctgagttggagagtttgattagcgcagcgattgctcctgaagctcctcatgtgattacagatgggggaattatccggactggatttgatgagactttagacaagtatcgttgcgttctcagagaagggactagctggattgctgagattgaggctaaggagcgagaaaactctggtatcagcacgctcaagattgactacaataaaaaggatggctactattttcatgtgaccaattcgcaactaggaaatgtgccagctcactttttccgcaaggcgacgctgaaaaactcagaacgctttggaaccgaagaattagcccgtatcgagggagatatgcttgaggcgcgtgagaagtcagccaacctcgaatacgaaatatttatgcgcattcgtgaagaggtcggcaagtacatccagcgtttacaagctctagcccaaggaattgcgacggttgatgtcttacagagtctggcggttgtggctgaaacccagcatttgattcgacctgagtttggtgacgattcacaaattgatatccggaaagggcgccatgctgtcgttgaaaaggttatgggggctcagacctatattccaaatacgattcagatggcagaagataccagtattcaactggttacagggccaaacatgagtgggaagtctacctatatgcgtcagttagccatgacggcggttatggcccagctgggttcctatgttcctgctgaaagcgcccatttaccgatttttgatgcgatttttacccgtatcggagcagcagatgacttggtttcgggtcagtcaacctttatggtggagatgatggaggccaataatgccatttcgcatgcgaccaagaactctctcattctctttgatgaattgggacgtggaactgcaacttatgacgggatggctcttgctcagtccatcatcgaatatatccatgagcacatcggagctaagaccctctttgcgacccactaccatgagttgactagtctggagtctagtttacaacacttggtcaatgtccacgtggcaactttggagcaggatgggcaggtcaccttccttcacaagattgaaccgggaccagctgataaatctacggtatccatgttgccaagattgctggcttgccagcagaccttt

SEQ ID NO: 4332 - protein, 786 aa, Streptococcus pneumoniae
  DNA mismatch repair protein HexA, FRAMESHIFT
MLSRLIFEKERQKMAIEKLSPGMQQYVDIKKQYPDAFLLFRMGDFYELFYEDAVNAAQILEISLTSRNKNADNPIPMAGVPYHSAQQYIDVLIEQGYKVAIAEQMEDPKQAVGVVKREVVQVITPGTVVDSSKPDSQNNFLVSIDREGNQFGLAYMDLVTGDFYVTGLLDFTLVCGEIRNLKAREVVLGYDLSEEEEQILSRQMNLVLSYEKESFEDLHLLDLRLATVEQTASSKLLQYVHRTQMRELNHLKPVIRYEIKDFLQMDYATKASLDLVENARSGKKQGSLFWLLDETKTAMGMRLLRSWIHRPLIDKERIVQRQEVVQVFLDHFFERSDLTDSLKGVYDIERLASRVSFGKTNPKDLLQLATTLSSVPRIRAILEGMEQPTLAYLIAQLDAIPELESLISAAIAPEAPHVITDGGIIRTGFDETLDKYRCVLREGTSWIAEIEAKERENSGISTLKIDYNKKDGYYFHVTNSQLGNVPAHFFRKATLKNSERFGTEELARIEGDMLEAREKSANLEYEIFMRIREEVGKYIQRLQALAQGIATVDVLQSLAVVAETQHLIRPEFGDDSQIDIRKGRHAVVEKVMGAQTYIPNTIQMAEDTSIQLVTGPNMSGKSTYMRQLAMTAVMAQLGSYVPAESAHLPIFDAIFTRIGAADDLVSGQSTFMVEMMEANNAISHATKNSLILFDELGRGTATYDGMALAQSIIEYIHEHIGAKTLFATHYHELTSLESSLQHLVNVHVATLEQDGQVTFLHKIEPGPADKSTVSMLPRLLACQQTF

SEQ ID NO: 4333 - DNA, 444 bp, Streptococcus pneumoniae
atgagaaaaagagatcgtcatcagttaataaaaaaaatgattactgaggagaaattaagtacacaaaaagaaattcaagatcggttggaggcgcacaatgtttgtgtgacgcagacaaccttgtctcgtgatttgcgcgaaatcggcttgaccaaggtcaagaaaaatgatatggtgtattatgtactagtaaatgagacagaaaagattgatttggtggaatttttgtctcatcatttagaaggtgttgcaagagcagagtttaccttggtgcttcataccaaattgggagaagcctctgttttggcaaatattgtagatgtaaacaaggatgaatggattttaggaacagttgctggtgccaataccttattggttatttgtcgagatcagcacgttgccaaactcatggaagatcgtttgctagatttgatgaaagataag

SEQ ID NO: 4334 - protein, 148 aa, Streptococcus pneumoniae
  transcriptional repressor, putative; Cellular location: cytoplasm; Similar to strain R6 sequence 15903930 (1.E-80)
MRKRDRHQLIKKMITEEKLSTQKEIQDRLEAHNVCVTQTTLSRDLREIGLTKVKKNDMVYYVLVNETEKIDLVEFLSHHLEGVARAEFTLVLHTKLGEASVLANIVDVNKDEWILGTVAGANTLLVICRDQHVAKLMEDRLLDLMKDK

SEQ ID NO: 4335 - DNA, 1689 bp, Streptococcus pneumoniae
atgaatacaaaagaattgattgctagcgaattatctagcatcattgatagcctggaccaagaggctattttaaagttactggaaacccctaaaaactcagaaatgggagacattgctttccctgctttttctcttgcaaaagtcgaacgtaaagcaccacaaatgattgcggctgaactggctgaaaaaatgaacagccaagcctttgaaaaagttgtcgcaacaggaccttacgttaactttttccttgataaatctgccatttctgctcaagtattgcaagctgttaccactgaaaaagaacactatgctgaccaaaatattggtaaacaagaaaatgttgttatcgacatgtctagtccgaatatcgctaaaccattttctattggccacctgcgttcaactgttatcggagatagcttgtcacatattttccaaaaaatcggttatcaaacggtcaaggtcaaccatttgggagactggggtaaacaatttgggatgttgattgttgcctacaaaaaatggggcgacgaagaagctgtaaaagctcatccaatcgatgaactccttaaactctatgtccgcatcaacgctgaagctgaaaatgaccctagcttggatgaagaagcgcgcgaatggttccgtaaacttgaaaatggagatgaggaagctctcgctctttggcaatggttccgcgatgaaagtttagtggaatttaaccgcctttacaatgaattgaaggttgaatttgacagctataacggagaagccttctacaatgataagatggatgcagttgtagacattctttctgaaaaaggactacttcttgaatcagaaggtgcccaagttgtgaatcttgagaaatatggaattgaacatccagccctcatcaagaagtctgatggtgcaactctctatatcacacgtgacttggctgcagccctctaccgtaaaaacgaataccaatttgctaaatctatctatgtcgttggtcaagaacaatctgcccactttaaacagctcaaagctgtcttgcaagagatgggctacgactggagtgacgacattactcacgttccttttggtttggttacaaaagaagggaagaaactctctactcgtaaagggaatgtcatcttgctagagcctactgttgcagaggctgttagccgtgccaaggtccaaatcgaggctaaaaatcctgaactagaaaacaaagaccaagtagcacatgctgttgggattggagccattaaattctatgacctcaaaaccgaccgtacaaatggatacgacttcgacctagaggctatggtatccttcgagggtgaaactggaccttacgttcaatatgcctacgctcgtatccaatctatcttacgcaaagccgatttcaaaccagaaacagctggcaactatagcttgaatgatactgaaagctgggaaatcattaaactcattcaagacttcccacgtattatcaaccgtgcggcagataactttgaaccttctatcattgctaaatttgcaattagcctggctcaatcctttaacaaatactatgcacatacacgtatcttggatgaaagcccagaacgcgacagccgtctagccctcagctacgcaaccgcagtcgttctcaaagaagcccttcgcttgcttggagtagaagcgccagagaagatg

SEQ ID NO: 4336 - protein, 563 aa, Streptococcus pneumoniae
  arginyl-tRNA synthetase (argS); Cellular location: cytoplasm; Similar to strain R6 sequence 15903931 (0.E+01)
MNTKELIASELSSIIDSLDQEAILKLLETPKNSEMGDIAFPAFSLAKVERKAPQMIAAELAEKMNSQAFEKVVATGPYVNFFLDKSAISAQVLQAVTTEKEHYADQNIGKQENVVIDMSSPNIAKPFSIGHLRSTVIGDSLSHIFQKIGYQTVKVNHLGDWGKQFGMLIVAYKKWGDEEAVKAHPIDELLKLYVRINAEAENDPSLDEEAREWFRKLENGDEEALALWQWFRDESLVEFNRLYNELKVEFDSYNGEAFYNDKMDAVVDILSEKGLLLESEGAQVVNLEKYGIEHPALIKKSDGATLYITRDLAAALYRKNEYQFAKSIYVVGQEQSAHFKQLKAVLQEMGYDWSDDITHVPFGLVTKEGKKLSTRKGNVILLEPTVAEAVSRAKVQIEAKNPELENKDQVAHAVGIGAIKFYDLKTDRTNGYDFDLEAMVSFEGETGPYVQYAYARIQSILRKADFKPETAGNYSLNDTESWEIIKLIQDFPRIINRAADNFEPSIIAKFAISLAQSFNKYYAHTRILDESPERDSRLALSYATAVVLKEALRLLGVEAPEKM

SEQ ID NO: 4337 - DNA, 387 bp, Streptococcus pneumoniae
atgaaggctcaagcgattgtcacaagtcaagggagaattgtttctttggatatcgctgtgaactattgtcatgatatgaagttgttcaaaatgagtcgcagaaatatcggacaagctggtaaaatcttggctgacagtggttatcaagggctcatgaagatatatcctcaagcacaaactccacgtaaatccagcaaactcaagccactaacagttgaagataaagcctataaccatgcgctatccaaggagagaagcaaggttgagaacatctttgccaaagtaaaaacgtttaaaatgatttcaacaacctatcgaaatcatcgtaaacacttcggattacgaatgaatttgattgctggcattatcaatcatgaactaggattc

SEQ ID NO: 4338 - protein, 129 aa, Streptococcus pneumoniae
  IS1381, transposase OrfB FRAMESHIFT; Cellular location: cytoplasm; Similar to strain R6 sequence 15903615 (2.E-66)
MKAQAIVTSQGRIVSLDIAVNYCHDMKLFKMSRRNIGQAGKILADSGYQGLMKIYPQAQTPRKSSKLKPLTVEDKAYNHALSKERSKVENIFAKVKTFKMISTTYRNHRKHFGLRMNLIAGIINHELGF

SEQ ID NO: 4339 - DNA, 459 bp, Streptococcus pneumoniae
ttgataagaactctagagttagctccccatattgaaggtggctattttagacaaacaaaaaaagcttcagacactataaaccttgctggtaagggaagggcgctttataccagtatttatttcttattagaagaaacgaatccttcacattttcaccgattgacagcagatgaaatctggtattttcatgcaggatccccacttactgttcacatgattacagcagatggtcactacgaagcagtcactttaggcctggacatatccaaagggcaacaacttcactactgtgttcctaagggcactatttggggatcaacagttgataaggatgatgctctggtttcttgtcttgttgctcctggttttgaatttgaggattttgaattatttgaaagggtagatctactggcgacctatccagagcacaaggagatgattgagcgtttgaccagatac

SEQ ID NO: 4340 - protein, 153 aa, Streptococcus pneumoniae
  conserved hypothetical protein (Tranposase); Cellular location: cytoplasm; Similar to strain R6 sequence 15902886 (3.E-20)
MIRTLELAPHIEGGYFRQTKKASDTINLAGKGRALYTSIYFLLEETNPSHFHRLTADEIWYFHAGSPLTVHMITADGHYEAVTLGLDISKGQQLHYCVPKGTIWGSTVDKDDALVSCLVAPGFEFEDFELFERVDLLATYPEHKEMIERLTRY

SEQ ID NO: 4341 - DNA, 705 bp, Streptococcus pneumoniae
atgacaaaacaagtcttattagtggatgatgaagaacacattctgaaattgcttgactaccatttaagtaaggaaggcttttctactcaattggtgacaaatggacggaaggccttagctttggcagaaacagaaccctttgattttatcttgcttgatatcatgttaccacaattagatggcatggaagtttgtaagcggctgagagccaaaggcgtcaaaactccaattatgatggtttctgcgaaaagtgatgaatttgataaggttttggccttggaattaggggctgatgactacctgaccaagccttttagccctagagaattgctggcgcgtgtcaaggctgtcctcaggcgaactaaaggagaacaagaaggagatgattcagataatatcgctgacgattcttggctatttgggaccttgaaagtataccctgagcgtcatgaagtctacaaggcgaataagttactgagtttgaccccaaaagaatttgaactcttgctctatcttatgaaacatcccaacatgacactgactagagagcgtcttttggaacgtatctgggggtatgactttgggcaggaaacacgtttggtggacgttcatattggtaagttgagggaaaaaattgaagacaatcctaaagcccctcaatttattcgaaccattcggggttatggttataagttcaaggagtta

SEQ ID NO: 4342 - protein, 235 aa, Streptococcus pneumoniae
  response regulator; Cellular location: cytoplasm; Similar to strain R6 sequence 15903934 (e-134)
MTKQVLLVDDEEHILKLLDYHLSKEGFSTQLVTNGRKALALAETEPFDFILLDIMLPQLDGMEVCKRLRAKGVKTPIMMVSAKSDEFDKVLALELGADDYLTKPFSPRELLARVKAVLRRTKGEQEGDDSDNIADDSWLFGTLKVYPERHEVYKANKLLSLTPKEFELLLYLMKHPNMTLTRERLLERIWGYDFGQETRLVDVHIGKLREKIEDNPKAPQFIRTIRGYGYKFKEL

SEQ ID NO: 4343 - DNA, 1329 bp, Streptococcus pneumoniae
atgaaacgctaccttcaattttggctagtcaatctaagtgttagcctcattctgattgcagggatggcattaacttggatcagtaaaggcatcggtctctttcttctagccctttctttgggactaggtggctactggctcttttgcctttggaaatgggaagttgcttttgagaccttgcaccaacctctcttgaccagtagtgaatactttttagaaaaagggcaagaagacttaaagtctttggctcagtatgtgtctggcctaaaaaccaaagtctcccaacaggatcagcaatacaaggatctagccgaaacaatggaggttcttctgtcgcacctaaccatggggacgtttttagtttccgctcaaggtcagatgttattatccagtcgctctctgcctcattattttcccgatgtggacggcgacataagttcacttgatgacctcaaacggatggatattcggaatttagttcaccaagcctttgatcaaaaaacaaggttaaaacaagaagtaagtgggtttcatgagggtgacttgattttagaagtgacagcagttcccgtttttagccccacccaatctgtggaagctgtgctcgtcttgctatatgatttaacaacgattagaacttatgaaaagttaaatttagcctttgtctcaaatgcctcccatgaattgaggacaccagttacttcgattaagggctttgctgaaaccattaaggggatgtcagctgaagaagaagcgctcaaggatgactttctagacattatttacaaagaaagtttgcgtcttgagcatattgttgagcatcttcttaccttatctaaggctcaacaaatgcctatacaatggacgaccctttctttggcagaatttgtacaggatttgactcaaagcttgcaacctcagctcaagaagaaggatttacagctaaaggtgcaggtgccagatgatgtcaccctcgtatcagatagtcaattactttcccaaatcttactcaatcttttatccaatgccatccgttacactgaacaagggggaaaaattgaggtcaagacccaaaaggtgaacgaaggcattaagatttctgtatcagatacagggattggtattagtcaattagagcaggatcgtatttttgaacgtttttaccgagttaataaaggtcgaagcagacaaactggtggcactggtcttggccttgccattgtcaaagaactcagtcaattattaggtggccaagtcacggtgacgagtcagcttggcagaggcagttgcttcacgatttttcttcctaaccaatctttcgcacaggac

SEQ ID NO: 4344 - protein, 443 aa, Streptococcus pneumoniae
  sensor histidine kinase PnpS (pnpS); Cellular location: membrane; Similar to strain R6 sequence 15903935 (0.E+01)
MKRYLQFWLVNLSVSLILIAGMALTWISKGIGLFLLALSLGLGGYWLFCLWKWEVAFETLHQPLLTSSEYFLEKGQEDLKSLAQYVSGLKTKVSQQDQQYKDLAETMEVLLSHLTMGTFLVSAQGQMLLSSRSLPHYFPDVDGDISSLDDLKRMDIRNLVHQAFDQKTRLKQEVSGFHEGDLILEVTAVPVFSPTQSVEAVLVLLYDLTTIRTYEKLNLAFVSNASHELRTPVTSIKGFAETIKGMSAEEEALKDDFLDIIYKESLRLEHIVEHLLTLSKAQQMPIQWTTLSLAEFVQDLTQSLQPQLKKKDLQLKVQVPDDVTLVSDSQLLSQILLNLLSNAIRYTEQGGKIEVKTQKVNEGIKISVSDTGIGISQLEQDRIFERFYRVNKGRSRQTGGTGLGLAIVKELSQLLGGQVTVTSQLGRGSCFTIFLPNQSFAQD

SEQ ID NO: 4345 - DNA, 108 bp, Streptococcus pneumoniae
gtgttggcttgtatattccgtggtttcggttttagcttcaataaatttattatctgtgaccacttgttgaccttgtttggagtggataaagctgataaaatcttgacc

SEQ ID NO: 4346 - protein, 36 aa, Streptococcus pneumoniae
  hypothetical protein
MLACIFRGFGFSFNKFIICDHLLTLFGVDKADKILT

SEQ ID NO: 4347 - DNA, 873 bp, Streptococcus pneumoniae
atgaaattcaaaaaaatgcttactcttgcagccattggcttatcaggatttgggcttgttgcctgtggcaatcagtcagctgcttccaaacagtcagcttcaggaacgattgaggtgatttcacgagaaaatggctctgggacacggggtgccttcacagaaatcacagggattctcaaaaaagacggtgataaaaaaattgacaacactgccaaaacagctgtgattcaaaatagtacagaaggtgttctctcagcagttcaagggaatgctaatgctatcggctacatctccttgggatctttaacgaaatctgtcaaggctttagagattgatggtgtcaaggctagtcgagacacagttttagatggtgaataccctcttcaacgtcccttcaacattgtttggtcttctaatctttccaagctaggtcaagattttatcagctttatccactccaaacaaggtcaacaagtggtcacagataataaatttattgaagctaaaaccgaaaccacggaatatacaagccaacacttatcaggcaagttgtctgttgtaggttccacttcagtatcttctttaatggaaaaattagcagaagcttataaaaaagaaaatccagaagttacgattgatattacctctaatgggtcttcagcaggtattaccgctgttaaggagaaaaccgctgatattggtatggtttctagggaattaactcctgaagaaggtaagagtctcacccatgatgctattgctttagacggtattgctgttgtggtcaataatgacaataaggcaagccaagtcagtatggctgaacttgcagacgtttttagtggcaaattaaccacctgggacaagattaaa

SEQ ID NO: 4348 - protein, 291 aa, Streptococcus pneumoniae
  phosphate ABC transporter, phosphate-binding protein (pstS); Cellular location: lipoprotein; Similar to strain R6 sequence 15903936 (e-160)
MKFKKMLTLAAIGLSGFGLVACGNQSAASKQSASGTIEVISRENGSGTRGAFTEITGILKKDGDKKIDNTAKTAVIQNSTEGVLSAVQGNANAIGYISLGSLTKSVKALEIDGVKASRDTVLDGEYPLQRPFNIVWSSNLSKLGQDFISFIHSKQGQQVVTDNKFIEAKTETTEYTSQHLSGKLSVVGSTSVSSLMEKLAEAYKKENPEVTIDITSNGSSAGITAVKEKTADIGMVSRELTPEEGKSLTHDAIALDGIAVVVNNDNKASQVSMAELADVFSGKLTTWDKIK

SEQ ID NO: 4349 - DNA, 129 bp, Streptococcus pneumoniae
ttgtcacatcttgtcctttctagtgaagaaagtaagggagatacgacacctccctacttgccttctttatcttattgtacgatgaaacgtctgcatctctttagagatttatggagcaaacattttatt

SEQ ID NO: 4350 - protein, 43 aa, Streptococcus pneumoniae
  hypothetical protein
MSHLVLSSEESKGDTTPPYLPSLSYCTMKRLHLFRDLWSKHFI

SEQ ID NO: 4351 - DNA, 861 bp, Streptococcus pneumoniae
gtgacaaaacaagccttcaaagaagcagtttttagggcaatttttttcatgagtgcaacagtagctgttgtagctattttgctaatctgtttctttatttttagtaatggcttacctttcatagctaactacggctttgcccgttttttattaggcagtgattggtcgccaacgaacattccggcaagctatggtattttaccaatgatcgttggttccttattaattaccttaggagcgattgtgattggggtgccaacaggcatcttgacatcggtgtttatggtttattattgtccaaagcccgtctatggcttcttaaaatcagctatcaacttgatggcagccattccatctattgtttatggttttttcggcctacaattattggtgccttggattagaagctttttaggaaatggcatgagtgtcctaaccgcttcgttactattaggaataatgattttgccaaccattatcagtttgtcagaatctgctatccgaacagttcccaaaacgtattattctggtagcttggctctaggagctagtcatgaacggagtatttttagtgtcatcttgccagctgcgagatctggtattttatcagcagttattttaggaatcggtcgcgcagtaggtgaaaccatggcagttattttggtggcaggcaaccagccgattattccaagtggactcttttcaggaaccagaaccttaacaaccaatattgttctggaaatggcttacgcatcaggtcagcatagggaagcccttattgcaacctcagcagttctctttttccttattctcttgattaatgcctactttgcctacttgaaaggaaaatcatcttatgag

SEQ ID NO: 4352 - protein, 287 aa, Streptococcus pneumoniae
  phosphate ABC transporter, permease protein (pstC); Cellular location: membrane; Similar to strain R6 sequence 15903937 (e-157)
MTKQAFKEAVFRAIFFMSATVAVVAILLICFFIFSNGLPFIANYGFARFLLGSDWSPTNIPASYGILPMIVGSLLITLGAIVIGVPTGILTSVFMVYYCPKPVYGFLKSAINLMAAIPSIVYGFFGLQLLVPWIRSFLGNGMSVLTASLLLGIMILPTIISLSESAIRTVPKTYYSGSLALGASHERSIFSVILPAARSGILSAVILGIGRAVGETMAVILVAGNQPIIPSGLFSGTRTLTTNIVLEMAYASGQHREALIATSAVLFFLILLINAYFAYLKGKSSYE

SEQ ID NO: 4353 - DNA, 813 bp, Streptococcus pneumoniae
atgagtaaatacctgctaaaacttctcgtttattgtttttcagctttaacctttggctctctctttttaatcattggttttatcctcatcaaaggcttacctcatctaagtctatccctcttttcttggacttatacttctgagaacatttcccttatgccagcgattatttccaccgttattctggtctttggtgctcttcttttagccttgcccatagggatttttgctggtttttatcttgtggaatatacaaaaaaagattccctttgtgttaaaatcatgcgattggcctcagataccttatctgggattccttccattgtttttggtctgtttggcatgctcttctttgtagtcttcttaggttttcaatactctctgttatcaggaatcttaacctcagttatcatggtgttgccagtcattattcgctcaacagaagaagcccttttatctgttagtgatagcatgcgtcaagcaagttatggacttggggcaggtaagttacggactgtttttagaattgttctaccagttgccatgccaggtattttagctggagtgatactagctattggccgtatcgttggtgaaacagctgccctcatgtatacattaggtacctctaccaatacgccaagtagtctcatgtcttcaggccgttctctagccctacatatgtatatgctgtcaagtgaggggctacatgtcaatgaagcctatgctaccggcgtgattttgattattactgttttaatgataaatactctatcaagcttattatctcgaaaacttgtgaaaggagcttcc

SEQ ID NO: 4354 - protein, 271 aa, Streptococcus pneumoniae
  phosphate ABC transporter, permease protein (pstA); Cellular location: membrane; Similar to strain R6 sequence 15903938 (e-146)
MSKYLLKLLVYCFSALTFGSLFLIIGFILIKGLPHLSLSLFSWTYTSENISLMPAIISTVILVFGALLLALPIGIFAGFYLVEYTKKDSLCVKIMRLASDTLSGIPSIVFGLFGMLFFVVFLGFQYSLLSGILTSVIMVLPVIIRSTEEALLSVSDSMRQASYGLGAGKLRTVFRIVLPVAMPGILAGVILAIGRIVGETAALMYTLGTSTNTPSSLMSSGRSLALHMYMLSSEGLHVNEAYATGVILIITVLMINTLSSLLSRKLVKGAS

SEQ ID NO: 4355 - DNA, 750 bp, Streptococcus pneumoniae
atgggaacattttcagtcagacacctagacttattttacggggattttcaagccttaaaaaatatttcgattcaattaccagaaagacagattactgccttgataggcccatctggttgtggcaaatcaacttttctaaaaacccttaaccggatgaacgatttggttccttcttgccatattgaaggccaagtcctcttagatgagcaagatatttatagtagcaaattcaaccttaatcagctacgtaagcgtgtagggatggtttttcaacagcctaatccctttgccatgtctatctatgataacgtggcttatggcccaaggacacatggtattcgagacaaaaaacaattagatgccttagtggagaaatctttaaaaggggcagccatttgggaagaagtcaaagatgatcttaaaaagagtgccatgtccttatctggcggtcagcagcaacgcctttgcattgcgcgagctttagcagtagaacctgatattctgttaatggatgagccgacttcagccttagaccctatctccactttaaaaattgaagacctcattcagcaactaaaaaaggattatacgattatcattgttacccataacatgcaacaagcttcacgtatttcagataaaactgcttttttcttaacaggagaaatttgcgaatttggagataccgttgacgtgtttaccaatccaaaagatcagcgcacagaagactatatttcaggacggttcgga

SEQ ID NO: 4356 - protein, 250 aa, Streptococcus pneumoniae
  phosphate ABC transporter, ATP-binding protein (pstB); Cellular location: cytoplasm; Similar to strain R6 sequence 15903939 (e-143)
MGTFSVRHLDLFYGDFQALKNISIQLPERQITALIGPSGCGKSTFLKTLNRMNDLVPSCHIEGQVLLDEQDIYSSKFNLNQLRKRVGMVFQQPNPFAMSIYDNVAYGPRTHGIRDKKQLDALVEKSLKGAAIWEEVKDDLKKSAMSLSGGQQQRLCIARALAVEPDILLMDEPTSALDPISTLKIEDLIQQLKKDYTIIIVTHNMQQASRISDKTAFFLTGEICEFGDTVDVFTNPKDQRTEDYISGRFG

SEQ ID NO: 4357 - DNA, 648 bp, Streptococcus pneumoniae
atgagaaatcaatttgacttagaattgcatgaattagaacaatcctttttaggactagggcaacttgtccttgaaacagcttcaaaagccttactggccttagcctccaaagacaaggagatggcagagctaattatcaataaggatcatgctatcaaccaaggtcaaagcgctatcgaattgacctgtgcccgtttgttggccttgcagcagccacaagtgtctgaccttcgatttgtgattagcatcatgtcttcttgttcagaccttgaacgtatgggagaccatatggcaggcattgccaaagctgttttgcaactaaaagaaaatcaactagcccctgacgaagaacagttacaccaaatgggtaaattatccctcagcatgctagccgatttattggttgcctttcctttgcaccaagcctcaaaagctattagtattgctcaaaaagatgaacagattgaccaatattattatgccttatcaaaggaaatcattggacttatgaaagaccaagaaacctcaattcccaatggaactcaatacctttatatcatagggcatctggaacgcttcgctgattacattgctaacatttgtgaacgcctagtctacctagaaacaggagaactagtggatttgaat

SEQ ID NO: 4358 - protein, 216 aa, Streptococcus pneumoniae
  phosphate transport system regulatory protein PhoU (phoU); Cellular location: cytoplasm; Similar to strain R6 sequence 15903940 (e-118)
MRNQFDLELHELEQSFLGLGQLVLETASKALLALASKDKEMAELIINKDHAINQGQSAIELTCARLLALQQPQVSDLRFVISIMSSCSDLERMGDHMAGIAKAVLQLKENQLAPDEEQLHQMGKLSLSMLADLLVAFPLHQASKAISIAQKDEQIDQYYYALSKEIIGLMKDQETSIPNGTQYLYIIGHLERFADYIANICERLVYLETGELVDLN

SEQ ID NO: 4359 - DNA, 423 bp, Streptococcus pneumoniae
ttgaccaatttaagcagtgtagatagtgaggagttgtttcaattctatcgtgaacgagggaatgctgaaaactttatcaaagaaaggaaagcaggattctttggggataagacagatagttcgaccatgattaagaatgaagtacgtatgatgatgggctgtctggcttataatctctacctctttttaaagcagctagctggtgatgaagtaaagtccttgactatcaagcgttttcgacgtctcttccttcatattgccggaaaatatgtctctactgctagacgacatattctcaaattctcaagtctatacgcctattcaaaacagtttcaagccttatttgatacaatctgccagataaatctgatactccctgttccatatagagctagagggcaggggaaaacatgcctaacagaa

SEQ ID NO: 4360 - protein, 141 aa, Streptococcus pneumoniae
  transposase, IS1380-Spn1 related, truncation ( ); Cellular location: cytoplasm; Similar to strain R6 sequence 15903941 (3.E-75)
MTNLSSVDSEELFQFYRERGNAENFIKERKAGFFGDKTDSSTMIKNEVRMMMGCLAYNLYLFLKQLAGDEVKSLTIKRFRRLFLHIAGKYVSTARRHILKFSSLYAYSKQFQALFDTICQINLILPVPYRARGQGKTCLTE

SEQ ID NO: 4361 - DNA, 516 bp, Streptococcus pneumoniae
gtgagaagaaatctgatagatagtttgattcagtatatgcttataatagaggtaaacaactcaggaagttcttgtaggttgcgagagtttggcgaaaaaattaaaagattacgtttggctaaaaaaatcagtcgttcagaattttgtggtgatgagtctgaattaagtatccgtcaattaattagaattgaaaatggagaatccagaccaatactaacaaagttaaaatatattgctgaacgtttgggggttgaagattacaagttgatgccaagttatatagagttggataaggaatacctagaattgaagtatttcttgatgaggactcctacatacgaagatgaaactatcgcccaaaagaaagagagtgtttttgataagatttttgaagagtattatgataggctacctgaggaagaaagatttatcatcccaaattattcatatctggcactaacgaactacacagttcaaaaattaccagaaaagctagttgaaatactgtccttctgg

SEQ ID NO: 4362 - protein, 172 aa, Streptococcus pneumoniae
  transcriptional regulator; Cellular location: cytoplasm; Similar to strain R6 sequence 15903942 (2.E-78)
MRRNLIDSLIQYMLIIEVNNSGSSCRLREFGEKIKRLRLAKKISRSEFCGDESELSIRQLIRIENGESRPILTKLKYIAERLGVEDYKLMPSYIELDKEYLELKYFLMRTPTYEDETIAQKKESVFDKIFEEYYDRLPEEERFIIPNYSYLALTNYTVQKLPEKLVEILSFW

SEQ ID NO: 4363 - DNA, 1014 bp, Streptococcus pneumoniae
atggaaaaacaaaccgtcgccgtcttggggcctggttcttggggaaccgccctttcacaagtcttaaatgacaatggacacgaggtacgtatttggggaaatcttcccgagcaaatcaatgaaattaatacacaccatactaataagcactactttaaagatgtcgttctagacgaaaatatcattgcctacaccgacttagcagaaacattgaaagatgtggatgcgattttgtttgttgtcccaacaaaagtgacacgacttgttgcccagcaagttgcacaaaccttggaccataaggttatcatcatgcacgcatcaaagggattagaacctgatagccataaacgattatcaaccattcttgaagaagaaattcctgaacatctccgtagtgatatcgtcgttgtttcagggcctagtcatgcagaagagaccattgtgcgtgacctaactttaataactgctgcttctaaagatttacaaacagctcaatacgttcagaagctatttagtaatcactacttccgactttataccaatacggatgttatcggggttgaaactgctggtgctcttaaaaatattattgctgtcggtgctggagctttacatggtcttggatttggtgataatgctaaggcagccatcatcgctcgaggtttagcagaaatcacccgcctaggggtagcactcggggccagtccattgacctatagcggcttatctggtgtgggagatttgatcgtaacgggaacttccatccactctcgtaactggagagctggagatgctctcggacgaggagaatccctagctgatatagaagctaatatgggcatggtaatcgaaggaatttcaacgactcgagcagcctatgaactagcccaagaacttggagtctatatgcccattacacaggctatttaccaagttatttatcacggaaccaatatcaaagatgccatttatgacatcatgaacaatgaatttaaagcagaaaatgagtggtct

SEQ ID NO: 4364 - protein, 338 aa, Streptococcus pneumoniae
  glycerol-3-phosphate dehydrogenase (NAD(P)+) (gpsA); Cellular location: cytoplasm; Similar to strain R6 sequence 15903943 (0.E+01)
MEKQTVAVLGPGSWGTALSQVLNDNGHEVRIWGNLPEQINEINTHHTNKHYFKDVVLDENIIAYTDLAETLKDVDAILFVVPTKVTRLVAQQVAQTLDHKVIIMHASKGLEPDSHKRLSTILEEEIPEHLRSDIVVVSGPSHAEETIVRDLTLITAASKDLQTAQYVQKLFSNHYFRLYTNTDVIGVETAGALKNIIAVGAGALHGLGFGDNAKAAIIARGLAEITRLGVALGASPLTYSGLSGVGDLIVTGTSIHSRNWRAGDALGRGESLADIEANMGMVIEGISTTRAAYELAQELGVYMPITQAIYQVIYHGTNIKDAIYDIMNNEFKAENEWS

SEQ ID NO: 4365 - DNA, 897 bp, Streptococcus pneumoniae
atgacatcaaaagttagaaaggcagtcatccctgctgctggactaggaactcgatttttaccagcaaccaaggcccttgccaaagaaatgttgccaatcgtagacaaaccaactatccagtttatcgtggaagaagctctcaaatcaggtattgaagatattctagttgtcactggtaaatcaaaacgttctattgaggaccactttgattcaaacttcgaattggaatataacctcaaagaaaaagggaaaacagatcttttgaagctagttgataaaacaactgacatgcgtctgcattttatccgccaaactcatccacgcggtctcggagatgctgttttgcaagccaaggctttcgtcggaaatgaaccttttgtcgttatgcttggtgatgacttgatggatatcacagacgaaaaggctgttccacttaccaaacaactcatggatgactacgagcgtacccacgcgtctactatcgctgtcatgccagtccctcatgacgaagtatctgcttacggggttattgctccgcaaggcgaaggaaaagatggtctttacagtgttgaaacctttgttgaaaaaccagctccagaggacgctcctagcgaccttgctattatcggacgctacctcctcacgcctgaaatttttgagattctcgaaaagcaagctccaggtgcaggaaatgaaattcagctgacagatgcaatcgacaccctcaataaaacacaacgtgtatttgctcgtgagttcaaaggggctcgttacgatgtcggagacaagtttggcttcatgaaaacatccatcgactacgccctcaaacacccacaagtcaaagatgatttgaagaattacctcatccaacttggaaaagaattgactgagaaggaa

SEQ ID NO: 4366 - protein, 299 aa, Streptococcus pneumoniae
  UTP-glucose-1-phosphate uridylyltransferase (galU); Cellular location: cytoplasm; Similar to strain R6 sequence 15903944 (e-167)
MTSKVRKAVIPAAGLGTRFLPATKALAKEMLPIVDKPTIQFIVEEALKSGIEDILVVTGKSKRSIEDHFDSNFELEYNLKEKGKTDLLKLVDKTTDMRLHFIRQTHPRGLGDAVLQAKAFVGNEPFVVMLGDDLMDITDEKAVPLTKQLMDDYERTHASTIAVMPVPHDEVSAYGVIAPQGEGKDGLYSVETFVEKPAPEDAPSDLAIIGRYLLTPEIFEILEKQAPGAGNEIQLTDAIDTLNKTQRVFAREFKGARYDVGDKFGFMKTSIDYALKHPQVKDDLKNYLIQLGKELTEKE

SEQ ID NO: 4367 - DNA, 966 bp, Streptococcus pneumoniae
ttgcggacactatcaaagaaaaagattatggagaacaaatttgtagaatttatcgaaaacaataaaaaagtaatcatttcatcagttgcagttggtgttgtattggtattagggtttggatggtattcatataaccaacaacaagcagaacaacaagcaaaaattgtacaattagaaaaagatagcaaatcagacaaagaacaagttgataaactatttgaatcatttgatgcatcttcagatgaatctatttctaaattaaaagaactatctgaaacttcacttaaaaccgatgcaggtaaagactatcttaataacaaagtcaaagaatcatctaaagcaattgtagattttcatttgcaaaaaggtttggcttatgatgttaaagattcagatgacaaatttaaagataaagcaactcttgaaacaaatgtaaaagaaattacaaaacaaattgattttatcaaaaaagttgatgaaacttttaaacaagagaatttggaagaaactcttaaatctctaaatgatcttgttgataaatatcaaaaacaaatcgaacttttgaagaaagaagaagaaaaagctgctgaaaaagctgctgaaaaagcaaaggaatcttctagtcaaagtaattcttctggtagtgcttctaatgagtcttataatggatcttccaattcaaatgtagattatagttcatctgaacaaactaatggatattcaaataattatggcggtcaagattattctggttcaggagatagttcaacaaatggtggatcatcagaacaatattcatctagcaattcaaacagcggagcaaataatgtctacagatataaaggcactggtgctgacggctatcaaagatactactacaaagatcataataatggagatgtgtatgatgacgatggaaattaccttgggaactttggtggcggcattgcagaacctagtcaacgc

SEQ ID NO: 4368 - protein, 322 aa, Streptococcus pneumoniae
  hypothetical protein (Surface protein pspA); Cellular location: membrane; Similar to strain R6 sequence 15902165 (4.E-06)
MRTLSKKKIMENKFVEFIENNKKVIISSVAVGVVLVLGFGWYSYNQQQAEQQAKIVQLEKDSKSDKEQVDKLFESFDASSDESISKLKELSETSLKTDAGKDYLNNKVKESSKAIVDFHLQKGLAYDVKDSDDKFKDKATLETNVKEITKQIDFIKKVDETFKQENLEETLKSLNDLVDKYQKQIELLKKEEEKAAEKAAEKAKESSSQSNSSGSASNESYNGSSNSNVDYSSSEQTNGYSNNYGGQDYSGSGDSSTNGGSSEQYSSSNSNSGANNVYRYKGTGADGYQRYYYKDHNNGDVYDDDGNYLGNFGGGIAEPSQR

SEQ ID NO: 4369 - DNA, 183 bp, Streptococcus pneumoniae
atgaaaatcaaagagcaaactaggaagctagccgcaggttgctcaaagcactgctttgaggttgtagatagaactgacgaagtcagctcaaaacatggttttgaggttgtagatgaaactgacgaagtcagtaaccatacctacggtaaggcgatgctgacgtggtttgaatttgattttcat

SEQ ID NO: 4370 - protein, 61 aa, Streptococcus pneumoniae
  box element
MKIKEQTRKLAAGCSKHCFEVVDRTDEVSSKHGFEVVDETDEVSNHTYGKAMLTWFEFDFH

SEQ ID NO: 4371 - DNA, 675 bp, Streptococcus pneumoniae
atgaaggaaatctttgatagacgttaccctgtgacgagtttcttcctcttagtgacggccttggtatttttactaatgttggtcactgcaggcggaaactttgacagggcagatacattatttcgatttggagccatgtatgggccagctattcgcctctttcccgagcaggtttggcgtctcttgtctgccatttttgttcatattgggtgggaacatttcattgttaatatgctttcactttattatcttggaaggcaggtagaggagattttcggttctaagcagtttttctttctctatcttttatcaggaatgatgggcaatctctttgtttttgtatttagtcctaaatccttagcagcaggcgcctctacctctctttatgggctatttgccgcgattattgttcttcgctatgcaactcgcaatccttatatccaacagctagggcaatcctatctgacactttttgtggttaacattattggaagtgttctgattccaggaatcagcctagcaggccatatcggtggtgcagttggtggcgcatttctagcagttatctttccagttagaggagaaaaacggatgtataacaccagccagagattaggagcggtagtcttgttcgtaggactcgccattttgcttttctacaagggaatgggattg

SEQ ID NO: 4372 - protein, 225 aa, Streptococcus pneumoniae
  conserved hypothetical protein; Cellular location: membrane; Similar to strain R6 sequence 15903945 (e-126)
MKEIFDRRYPVTSFFLLVTALVFLLMLVTAGGNFDRADTLFRFGAMYGPAIRLFPEQVWRLLSAIFVHIGWEHFIVNMLSLYYLGRQVEEIFGSKQFFFLYLLSGMMGNLFVFVFSPKSLAAGASTSLYGLFAAIIVLRYATRNPYIQQLGQSYLTLFVVNIIGSVLIPGISLAGHIGGAVGGAFLAVIFPVRGEKRMYNTSQRLGAVVLFVGLAILLFYKGMGL

SEQ ID NO: 4373 - DNA, 537 bp, Streptococcus pneumoniae
atgaaatcggaattacgcaagcaagtcttgcatgaaatgaaggctatatctcaagagcaaaaacaggctatagaccaagctttaaccgagcggcttttacaacaccccttttatcaagaagccaaggtcatcgcaacctacctctctttttctcatgagtttcaaacgcaggaactgattgagcaggcgctgaaggacggcaagaaggttttaatacccaaaacttatcccaaggggcgcatggactttgtggtctatgatccgcaacagttggtaaaaactttctttgccttactggagctacagggagatttggaagtggtggatgcatctcagattgatttgattcatgttcctggtctggcttttacgacgaaaggatatcggataggatacggtggaggctattatgaccgctatctggaacatttttctggtcgtactttgagtacgatatatccttgtcaaattcaggactttatacctgaaaaccatgatattcctgttcaggaggtattaattgatgaaggaaatctt

SEQ ID NO: 4374 - protein, 179 aa, Streptococcus pneumoniae
  5-formyltetrahydrofolate cyclo-ligase family protein; Cellular location: cytoplasm; Similar to strain R6 sequence 15903946 (1.E-97)
MKSELRKQVLHEMKAISQEQKQAIDQALTERLLQHPFYQEAKVIATYLSFSHEFQTQELIEQALKDGKKVLIPKTYPKGRMDFVVYDPQQLVKTFFALLELQGDLEVVDASQIDLIHVPGLAFTTKGYRIGYGGGYYDRYLEHFSGRTLSTIYPCQIQDFIPENHDIPVQEVLIDEGNL

SEQ ID NO: 4375 - DNA, 1128 bp, Streptococcus pneumoniae
atgttagatttgattcagactagacgagatttacaccagattccagagattggcttggaggagttcaagactcaggcttatttgctggatgtgattgagaaattgactacgggcaaggattttgttcaaattcgtacttggcggacagggattttggtctacctgcagggaagtcagccggagcgaaccattggttggcggacagatattgatggcctgcctatcgtcgaacaaacaggtctaccttttgcttctcaacaccaaggtcgcatgcatgcctgtgtccatgattttcatatgaccattgccttaggctgtcttgagcgcgcccttgaggagcaacccaagaataatctgctctttctatttcagcctgctgaagaaaatgaagctggtggtatgctcatgtatgaggacggtgcttttggagattggttgccagatcaattctatggtctccatgttcgtccagatttgaaagtcggccagattgcgactaatactcatacactctttgcaggaacttgcgaggtgaagatccgtttcaaaggcaaaggtggccacgcagcttttcctcatgaagccaatgacgccttggtggcggctagttactttgtgacccaagtgcagtcagttgttagccgcaatgtcaacccaatcgagggagcagtggtgaccttcggcgtttttcaagctggaaccaccaacaatgtcatcacagacacagcttttttacatggaactattcgtgccttgacacaggacatgagtctcttggtgcaaaagagggtaaaaacagttgcagaaggggttgcagctgcctttgatatggaagtcgaagtggaactcaaacaaggtggatacctacctgttgagaacaatccagccttggcgcgtgaactgatggacttctttgacgaaaaagacggaatcgagttgattgatatcgaacctgctatgacaggcgaggactttggttatctcctttcaaaggttgatggcgtgatgttttggctaggtatcgatagtccctacgctcttcatcaccctcaaatgagtcctaaggaagaagtcttagctattggggtggctgcggtgtctagtttcctgaaaaagaaggcagcagaa

SEQ ID NO: 4376 - protein, 376 aa, Streptococcus pneumoniae
  peptidase, M20/M25/M40 family; Cellular location: cytoplasm; Similar to strain R6 sequence 15903947 (0.E+01)
MLDLIQTRRDLHQIPEIGLEEFKTQAYLLDVIEKLTTGKDFVQIRTWRTGILVYLQGSQPERTIGWRTDIDGLPIVEQTGLPFASQHQGRMHACVHDFHMTIALGCLERALEEQPKNNLLFLFQPAEENEAGGMLMYEDGAFGDWLPDQFYGLHVRPDLKVGQIATNTHTLFAGTCEVKIRFKGKGGHAAFPHEANDALVAASYFVTQVQSVVSRNVNPIEGAVVTFGVFQAGTTNNVITDTAFLHGTIRALTQDMSLLVQKRVKTVAEGVAAAFDMEVEVELKQGGYLPVENNPALARELMDFFDEKDGIELIDIEPAMTGEDFGYLLSKVDGVMFWLGIDSPYALHHPQMSPKEEVLAIGVAAVSSFLKKKAAE

SEQ ID NO: 4377 - DNA, 696 bp, Streptococcus pneumoniae
atgactgctacaaaaatgaacgctcaagaaattatccaatttatcgccaatgctgaaaagaaaaccagtgtcaaagtaacctttgaggggcaactcgcaactgctgtgcctagctctgttgtcaaactaggaaatgtcctattcggagactggaaggatgtggctccgcttcttgaaggtttggtagaaaatcaagattatgttgtcgagcaagatgctcgtaattctgcagttcctttgctagataagcgtgctatcaacgctcgtatcgagccaggtgcgattatccgtgaccaggtggaaattggtgacaatgctgttatcatgatgggatctgttatcaatatcggtgctgaaatcggtgctggaaccatgattgacatgggtgccatccttggtggccgtgccatcgttggaaaaaatagccacgttggtgcaggtgcagttttggcaggtgtgattgagccagctagtgctgaaccagtccgtgtcggagacaatgttcttatcggtgctaatgcagtggttatcgaaggagtccaaatcggtagtggttcagttgtcgcagcaggagctattgttacccaagatgtcccagaaaacgtggtagtagcaggtgttccagctcgtattatcaaagaaattgatgcccaaactcaacaaaaaacagcgctagaggatgcgcttcgtaccttg

SEQ ID NO: 4378 - protein, 232 aa, Streptococcus pneumoniae
  2,3,4,5-tetrahydropyridine-2-carboxylate N-succinyltransferase, putativ; Cellular location: cytoplasm; Similar to strain R6 sequence 15903948 (e-124)
MTATKMNAQEIIQFIANAEKKTSVKVTFEGQLATAVPSSVVKLGNVLFGDWKDVAPLLEGLVENQDYVVEQDARNSAVPLLDKRAINARIEPGAIIRDQVEIGDNAVIMMGSVINIGAEIGAGTMIDMGAILGGRAIVGKNSHVGAGAVLAGVIEPASAEPVRVGDNVLIGANAVVIEGVQIGSGSVVAAGAIVTQDVPENVVVAGVPARIIKEIDAQTQQKTALEDALRTL

SEQ ID NO: 4379 - DNA, 909 bp, Streptococcus pneumoniae
atgaatcagtatcagaaaaagattgttaacggaaaaatttattcgctcctatccggcttaatatggggaatctgtggaattttaggagagtacttctttactcattatcaggtgtcttcgggctggattacctctatgcgtttgacactggcagggagtcttgtactcatttggtctgcaatacaattaaaatcgcaagtgctagatatttggcgagacaagaaaaattacctgccctttttagcctatgctattttggggattttttcagttcagtattttttctatctctgtgtagaatactcaaatgctacgacagcaactattttacagtttattagccctgtctttatcctcttttacaatcgcttggtttatcaaaaacgagcgtcaaaaagcgctgttttctatgttttggttgccatgctgggtgtttgcttgatggcgacaaagggagacctctctcagttatccatgacgccgctagctcttataacaggtttgctgagtgccatgggtgttatgtttaatgttatcttgccccaaccttttgctaagcgttatggttttgttcctacggttgggtgggggatgattttggcaggtttgtttagcaatgtcctctcgccggtttatcagctttcctttactcttgatatttggagtatcttgatttgcctcattatcgctttctttggaacggcttttgcttttttcatttccatgaaggctgtgtccttggtttctcctttggtggttgccgttatcagtgccagtgaacctctctcttctgctctcttgagtgttttgttcttaggattagtagtggattggtccctccttctagctatagccttgattattttacccatgatatttttgtctatagaagaagcgaaagaaagtaga

SEQ ID NO: 4380 - protein, 303 aa, Streptococcus pneumoniae
  membrane protein; Cellular location: membrane; Similar to strain R6 sequence 15903949 (e-170)
MNQYQKKIVNGKIYSLLSGLIWGICGILGEYFFTHYQVSSGWITSMRLTLAGSLVLIWSAIQLKSQVLDIWRDKKNYLPFLAYAILGIFSVQYFFYLCVEYSNATTATILQFISPVFILFYNRLVYQKRASKSAVFYVLVAMLGVCLMATKGDLSQLSMTPLALITGLLSAMGVMFNVILPQPFAKRYGFVPTVGWGMILAGLFSNVLSPVYQLSFTLDIWSILICLIIAFFGTAFAFFISMKAVSLVSPLVVAVISASEPLSSALLSVLFLGLVVDWSLLLAIALIILPMIFLSIEEAKESR

SEQ ID NO: 4381 - DNA, 2475 bp, Streptococcus pneumoniae
gtgaggaaatccatgcaaaatcaattaaatgaattaaaacgaaaaatgctggaatttttccagcaaaaacaaaaaaataaaaaatcagctagacctggcaagaaaggttcaagtaccaaaaaatctaaaaccttagataagtcagtcattttcccagctattttactgagtataaaagccttatttaacttactctttgtactcggttttctaggaggaatgttgggagctgggattgctttgggatacggagtggccttatttgacaaggttcgggtgcctcagacagaagaattggtgaatcaggtcaaggacatctcttctatttcagagattacctattcggacgggacggtgattgcttccatagagagtgatttgttgcgcacttctatctcatctgagcaaatttcggaaaatctgaagaaggctatcattgcgacagaagatgaacactttaaagaacataagggtgtagtacccaaggcggtgattcgtgcgaccttggggaaatttgtaggtttgggttcctctagtgggggttcaaccttgacccagcaactaattaaacagcaggtggttggggatgcgccgaccttggctcgtaaggcggcagagattgtggatgctcttgccttggaacgcgccatgaataaagatgagattttaacgacctatctcaatgtggctccctttggccgaaataataagggacagaatattgcaggggctcggcaagcagctgagggaattttcggtgtagatgccagtcagttgactgttcctcaagcagcatttttagcaggacttccacagagtcccattacttactctccttatgaaaatactggggagttgaagagtgatgaagacctagaaattggcttaagacgggctaaggcagttctttacagtatgtatcgtacaggtgcattaagcaaagacgagtattctcagtacaaggattatgaccttaaacaggactttttaccatcgggcacggttacaggaatttcacgagactatttatactttacaactttggcagaagctcaagaacgtatgtatgactatctagctcagagagacaatgtctccgctaaggagttgaaaaatgaggcaactcagaagttttatcgagatttggcagccaaggaaattgaaaatggtggttataagattactactaccatagatcagaaaattcattctgccatgcaaagtgcggttgctgattatggctatcttttagacgatggaacaggtcgtgtagaagtagggaatgtcttgatggataaccaaacaggtgctattctaggctttgtaggtggtcgtaattatcaagaaaatcaaaataatcatgcctttgataccaaacgttcgccagcttctactaccaagcccttgctggcctacggtattgctattgaccagggcttgatgggaagtgaaacgattctatctaactatccaacaaactttgctaatggcaatccgattatgtatgctaatagcaagggaacaggaatgatgaccttgggagaagctctgaactattcatggaatatccctgcttactggacctatcgtatgctccgtgaaaagggtgttgatgtcaagggttatatggaaaagatgggttacgagattcctgagtacggtattgagagcttgccaatgggtggtggtattgaagtcacagttgcccagcataccaatggctatcagaccttagctaataatggagtttatcatcagaagcatgtgatttcaaagattgaagcagcagatggtagagtggtgtatgagtatcaggataaaccggttcaagtctattcaaaagctactgcgacgattatgcagggattgctacgagaagttctatcctctcgtgtgacaacaaccttcaagtctaacctgacttctttaaatcctactctggctaatgcagattggattgggaagactggtacaaccaaccaagacgaaaatatgtggctcatgctttcgacacctagattaaccctaggtggctggattgggcatgatgataatcattcattgtcacgtagagcaggttattctaataactctaattacatggctcatctggtaaatgcgattcagcaagcttccccaagcatttgggggaacgagcgctttgctttagatcctagtgtagtgaaatcggaagtcttgaaatcaacaggtcaaaaaccagagaaggtttctgttgaaggaaaagaagtagaggtcacaggttcgactgttaccagctattgggctaataagtcaggagcgccagcgacaagttatcgctttgctattggcggaagtgatgcggattatcagaatgcttggtctagtattgtggggagtctaccaactccatccagctccagcagttcaagtagtagttctagcgatagcagtaactcaagtactacacgaccttcttcttcaagggcgagacga

SEQ ID NO: 4382 - protein, 825 aa, Streptococcus pneumoniae
  penicillin-binding protein 1B (pbp1B); Cellular location: membrane; Similar to strain R6 sequence 15903950 (0.E+01)
MRKSMQNQLNELKRKMLEFFQQKQKNKKSARPGKKGSSTKKSKTLDKSVIFPAILLSIKALFNLLFVLGFLGGMLGAGIALGYGVALFDKVRVPQTEELVNQVKDISSISEITYSDGTVIASIESDLLRTSISSEQISENLKKAIIATEDEHFKEHKGVVPKAVIRATLGKFVGLGSSSGGSTLTQQLIKQQVVGDAPTLARKAAEIVDALALERAMNKDEILTTYLNVAPFGRNNKGQNIAGARQAAEGIFGVDASQLTVPQAAFLAGLPQSPITYSPYENTGELKSDEDLEIGLRRAKAVLYSMYRTGALSKDEYSQYKDYDLKQDFLPSGTVTGISRDYLYFTTLAEAQERMYDYLAQRDNVSAKELKNEATQKFYRDLAAKEIENGGYKITTTIDQKIHSAMQSAVADYGYLLDDGTGRVEVGNVLMDNQTGAILGFVGGRNYQENQNNHAFDTKRSPASTTKPLLAYGIAIDQGLMGSETILSNYPTNFANGNPIMYANSKGTGMMTLGEALNYSWNIPAYWTYRMLREKGVDVKGYMEKMGYEIPEYGIESLPMGGGIEVTVAQHTNGYQTLANNGVYHQKHVISKIEAADGRVVYEYQDKPVQVYSKATATIMQGLLREVLSSRVTTTFKSNLTSLNPTLANADWIGKTGTTNQDENMWLMLSTPRLTLGGWIGHDDNHSLSRRAGYSNNSNYMAHLVNAIQQASPSIWGNERFALDPSVVKSEVLKSTGQKPEKVSVEGKEVEVTGSTVTSYWANKSGAPATSYRFAIGGSDADYQNAWSSIVGSLPTPSSSSSSSSSSSDSSNSSTTRPSSSRARR

SEQ ID NO: 4383 - DNA, 1254 bp, Streptococcus pneumoniae
atgcacatttttgatgagctaaaagagcgtggtttgatatttcaaacgactgatgaagaagctttgcgtaaagccctagaagaaggtcaagtttcttattatactggctacgatccaactgctgacagccttcacctaggccaccttgtcgcaatcttgacaagtcgtcgcttgcaactagcaggtcacaaaccttatgcgctcgttggcggtgctacaggtctcatcggagatccgtccttcaaagatgctgaacgtagtctccaaacaaaagacacagtagatggctgggtcaagtctatccaaggacaactttctcgttttcttgactttgaaaatggcgaaaacaaggctgtcatggtcaacaactacgactggtttggcagcatcagcttcattgacttcctccgtgatattggaaaatacttcacggtcaactacatgatgagtaaggaatctgttaaaaaacggatcgaaacaggaatttcttacactgagttcgcttaccaaatcatgcaagggtatgacttcttcgtccttaaccaagaccataatgtcactcttcaaatcggtggttctgaccagtggggaaatatgacagctggtaccgaattgcttcgtcgtaaggcggacaagactggtcacgttatcactgttccactaatcacagatgcaactggtaagaaatttggtaaatcagaaggaaatgccgtctggctcaatcccgaaaagacttctccatacgaaatgtaccaattctggatgaacgtgatggacgctgacgctgttcgcttcttgaaaatctttactttcttgtcacttgatgagattgaagatattcgtaaacaatttgaagcagcgccacacgaacgcttggctcaaaaagtcttggctcgtgaagttgttacacttgttcacggagaagaagcctacaaagaagcacttaacatcactgagcaactctttgcaggaaacatcaaaaacctttctgtcaaagagctcaaacaaggacttcgtggtgtgcccaactaccaagtacaggcagacgaaaacaacaatatcgtggaactgctcgtctcatctggtatagttaactcaaaacgccaagcccgtgaagacgtccaaaacggagccatctacgtaaacggcgaccgcatccaagagcttgactatgtcttgagtgacgctgataagttagagaatgaactgactgttatccgtcgtgggaagaaaaaatactttgtattgacttac

SEQ ID NO: 4384 - protein, 418 aa, Streptococcus pneumoniae
  tyrosyl-tRNA synthetase (tyrS); Cellular location: cytoplasm; Similar to strain R6 sequence 15903951 (0.E+01)
MHIFDELKERGLIFQTTDEEALRKALEEGQVSYYTGYDPTADSLHLGHLVAILTSRRLQLAGHKPYALVGGATGLIGDPSFKDAERSLQTKDTVDGWVKSIQGQLSRFLDFENGENKAVMVNNYDWFGSISFIDFLRDIGKYFTVNYMMSKESVKKRIETGISYTEFAYQIMQGYDFFVLNQDHNVTLQIGGSDQWGNMTAGTELLRRKADKTGHVITVPLITDATGKKFGKSEGNAVWLNPEKTSPYEMYQFWMNVMDADAVRFLKIFTFLSLDEIEDIRKQFEAAPHERLAQKVLAREVVTLVHGEEAYKEALNITEQLFAGNIKNLSVKELKQGLRGVPNYQVQADENNNIVELLVSSGIVNSKRQAREDVQNGAIYVNGDRIQELDYVLSDADKLENELTVIRRGKKKYFVLTY

SEQ ID NO: 4385 - DNA, 2070 bp, Streptococcus pneumoniae
gtgaataatatgtcttttaaagtgctacatagaggataccaacatatccgactatcatcttctttttcacttaccttggatattcaagactatcttcgttccttggcgagagatgaaaaggggattgagtctatccagttttacatggatcaacagcactttactctacgcataaaagaaggcttttctgtattagataatgcagaagcctttttaaaaagaattgataaagggaaagtttctgagttgatgactcttcccattcgtagagaagagagtgcttattctattgtttcaggtgcagcggttaagcgtgtactttttcgtagttttgtgccgtatcctattcgctatatatggacttgttatcaggctttgggttatattagagaagcctatcaaacactagcgcgtaaggaactaacgatggaagtcttggactgttcggctattttattgtctttgtttatgaaccaatccaagacagctagcaatatcatgtttatgcttgatttggggaatcatttagatcagtggtccttgaaaaaaactgcaacagatttagaacagagtcttcttgcaaaagagagcgatgtattcctagtacagggcgatacggttgttagtatcaagagttccgatgttcaaataggagatgtcttgatcttatctcaaggaaatgaaattctgtttgatggacaagtagtttcaggtttaggtatggtcaacgaaagttccttgacaggagagagttttccagttgaaaaaagagagtctgatttggtttgtgcaaatacagtattagaaactggagagttacgcattcgtgtaacagataatcagatgaacagccgtattttacagctgattgagttgatgaagaaatctgaagaaaacaagaaaacgaaacaacgctatttcatcaagatggcggataaagtcgtcaaatataatttcttgggggctgggctgacttacctattgacaggttctttttctaaggctatttctttcctattggtcgatttctcctgcgctttgaaaatctctactcctgtagcttatttgacagttatcaaggaagggttgaaccgtgaaatggtgattaaggatggagatgttctggagaaatatctggaagttgatactttcttgtttgataagacaggaacaatcacaactagttatcctatagttgaaaaggtgttaccttttggagactatagtgaggaagatattctcagaatcagtgcctgtcttgaggaacacatttatcatcctattgctaatgccatcgtcaagcaagctgagatagagggaattgaacatgaggaaatgcatgggaaactccaatatatcgcaagcaaggggatcaaatctcatatagatggccaaccagttcttattgggaattatgtcttgatgcaggatgagcagattcatatcagttcagaacaaaatgctttaattgaagagtacaagagtcactacaatctcttattcttggcttatcaaaatgaattgattggaatgttctgcattcatactcctttgagaaaagaagcaaaaacagccttggataaacttaaggcacaggggaaaaaattgattctggcaacaggagacaccttgattaggacagaggaattagtcaaagatttgccctttgatcaggtctatacagacttgaaacctgatgggaaatttgagttagtagagaaactgcagaaagcaggtcacactattttgatggttggagatggattgaatgactcagcggctttaactctatcagatatcggtgtggtgatgaatgagagtgcagatatttctaagcagatgagtgatatcttattgttagataatcgtttggatttcttccaagagttggattcgttatcatcatctttgcaaacactcatcaagaaaaatattcaggataccgttgtcgtaaatagtagtttgattggctttggcttatttaattggttcagtccttcaaatctctctatcttacataatctaacaaccttgcgcattgtcctgcgtagcctgtctattaaaaataga

SEQ ID NO: 4386 - protein, 690 aa, Streptococcus pneumoniae
  cation-transporting ATPase, EI-E2 family; Cellular location: membrane; Similar to strain R6 sequence 15903952 (0.E+01)
MNNMSFKVLHRGYQHIRLSSSFSLTLDIQDYLRSLARDEKGIESIQFYMDQQHFTLRIKEGFSVLDNAEAFLKRIDKGKVSELMTLPIRREESAYSIVSGAAVKRVLFRSFVPYPIRYIWTCYQALGYIREAYQTLARKELTMEVLDCSAILLSLFMNQSKTASNIMFMLDLGNHLDQWSLKKTATDLEQSLLAKESDVFLVQGDTVVSIKSSDVQIGDVLILSQGNEILFDGQVVSGLGMVNESSLTGESFPVEKRESDLVCANTVLETGELRIRVTDNQMNSRILQLIELMKKSEENKKTKQRYFIKMADKVVKYNFLGAGLTYLLTGSFSKAISFLLVDFSCALKISTPVAYLTVIKEGLNREMVIKDGDVLEKYLEVDTFLFDKTGTITTSYPIVEKVLPFGDYSEEDILRISACLEEHIYHPIANAIVKQAEIEGIEHEEMHGKLQYIASKGIKSHIDGQPVLIGNYVLMQDEQIHISSEQNALIEEYKSHYNLLFLAYQNELIGMFCIHTPLRKEAKTALDKLKAQGKKLILATGDTLIRTEELVKDLPFDQVYTDLKPDGKFELVEKLQKAGHTILMVGDGLNDSAALTLSDIGVVMNESADISKQMSDILLLDNRLDFFQELDSLSSSLQTLIKKNIQDTVVVNSSLIGFGLFNWFSPSNLSILHNLTTLRIVLRSLSIKNR

SEQ ID NO: 4387 - DNA, 309 bp, Streptococcus pneumoniae
ttgctatataataatgataaggaggaaataagtatgttaaaagaagtattaaccgttgcaaaagttgcgaaaaaatcttcattatttttgggtggtgtcgcatttggtacccttggtttgaaaatcttagcaagtaaggaagctaaaaaaggttattctaaagctttggctaaggcttacaagttgaaagacgagctagatgcatctgtttctgttgtgaagcaacatggagacgatgtcttgcaagatgccaaatatttgtacgagcaagagaaaaaagaagagcaattagatagccttataggtgaa

SEQ ID NO: 4388 - protein, 103 aa, Streptococcus pneumoniae
  hypothetical protein; Cellular location: membrane; Similar to strain R6 sequence 15903953 (7.E-53)
MLYNNDKEEISMLKEVLTVAKVAKKSSLFLGGVAFGTLGLKILASKEAKKGYSKALAKAYKLKDELDASVSVVKQHGDDVLQDAKYLYEQEKKEEQLDSLIGE

SEQ ID NO: 4389 - DNA, 845 bp, Streptococcus pneumoniae
atgaatacaaatctcaagcccaaacttcagcgttttgcttctgcgactgcctttgcctgtcctatctgtcaagaaaatctgactctgttagagactaatttcaagtgctgcaaccgtcattcttttgacttggcgaaatttggctatgtcaatctagtccctcaaatcaagcaatctgctaactacgacaaggaaaattttcaaaaccgtcaacaaatcctagaagccggcttttaccaagctatcttagatgctgtatctgacttgcttgcaagctcaaaaactaccacaacaattttggatatcggttgtggtgaaggattctattctcgcaaactacaagaaagtcactctgaaaaaactttctatgcctttgacatctccaaagattcagtccaaatcgctgctaaaagtgaacccaactgggcagtcaattggttcgttggcgacttggcacgacttcctataaagacgctaacatggatattctgcttgatatcttctcacctgccaactatggagaatttcgtcgcgttttatccaaagacggtatcttgataaaggttatcccaactgaaaatcacctcaaagaaatccgtcaaagagtacaggaccagctgacaaacaaggagtattctaaccaagatatcaaggagcatttccaggaacactttaccatcctatctagtcaaactgcctctctgactaagactatcacagcagaacaactccaagccctactcagtatgactcctctcctctttcacgttgaccagagcaaaattgactggagcaaactgacagagattaccatcgaagcagagattttggttgggaaagcattc

SEQ ID NO: 4390 - skipped

SEQ ID NO: 4391 - DNA, 141 bp, Streptococcus pneumoniae
ttgccgtacgtatggttactgacttcgtcagtttcatctacaacctcaaaaccatgttttgagctgacttcgtcagttttatctgcaacctcaaagctgtactttgagcaacctacggctagtttactctttgattttcat

SEQ ID NO: 4392 - protein, 47 aa, Streptococcus pneumoniae
  box element
MPYVWLLTSSVSSTTSKPCFELTSSVLSATSKLYFEQPTASLLFDFH

SEQ ID NO: 4393 - DNA, 204 bp, Streptococcus pneumoniae
atgttaaaaaaatatttttcaaaatataaatggacggatttattttggattttatttgttattttgacctgcctctatattggtaaccatgatttgtttactctcaatcatcaagaattctcttttcgtggtagcgtttggggtctggtactggccttatatcacttactattcattgataagtttgttatatcgaatcgaaaa

SEQ ID NO: 4394 - protein, 68 aa, Streptococcus pneumoniae
  hypothetical protein (23S rRNA m1G745); Cellular location: membrane; Similar to strain R6 sequence 15903954 (e-160)
MLKKYFSKYKWTDLFWILFVILTCLYIGNHDLFTLNHQEFSFRGSVWGLVLALYHLLFIDKFVISNRK

SEQ ID NO: 4395 - DNA, 570 bp, Streptococcus pneumoniae
atgaacaaattaatgaaatttatttcggtttttttgacgtcaattgtgttaattgtatcagcgattccaagtgtttcagctgtatacgcttctgaacaagtatcacaaattgaaacaaatatggaacttcaacctgtcacttctctaacagaagaacaaatcaatacacttgcaaacgaaatccaatcttttcatccagacgtctcacaacaatggatcaaagaagtaattaaccgacaattacaaggcgattatacaatcccacctacatactctccatttagagcagtttggcaaggtattacagttaatcaaatgggtgctctattagatactgcaatagctttagcattaggaggaactactgcaggccttgcaaatctaattaaagtaaaaggaaaacatgcagcaaaaagtgctattcgttcagcaatttctagatatctaggtagttggtttgtaaatgatgttgctttagaattcgctatgaatttattatcaccggggacttatttagcacaattatgggataaaaatgatgccattcctaacaacggaaggattaacttt

SEQ ID NO: 4396 - protein, 190 aa, Streptococcus pneumoniae
  hypothetical protein; Cellular location: outside; Similar to strain R6 sequence 15903956 (e-103)
MNKLMKFISVFLTSIVLIVSAIPSVSAVYASEQVSQIETNMELQPVTSLTEEQINTLANEIQSFHPDVSQQWIKEVINRQLQGDYTIPPTYSPFRAVWQGITVNQMGALLDTAIALALGGTTAGLANLIKVKGKHAAKSAIRSAISRYLGSWFVNDVALEFAMNLLSPGTYLAQLWDKNDAIPNNGRINF

SEQ ID NO: 4397 - DNA, 105 bp, Streptococcus pneumoniae
atgaaaatcaaagagcaaactaggaagctagccgcagttgctcaaagcactgctttgaggttgcagataaagctgacgtggtttgaagagattttcgaagagtat

SEQ ID NO: 4398 - protein, 35 aa, Streptococcus pneumoniae
  box element
MKIKEQTRKLAAVAQSTALRLQIKLTWFEEIFEEY

SEQ ID NO: 4399 - DNA, 2256 bp, Streptococcus pneumoniae
atgttatcactacaagaatttgtacaaaatcgttacaataaaaccattgcagaatgtagcaatgaagagctttaccttgctcttcttaactacagcaagcttgcaagcagccaaaaaccagtcaacactggtaagaaaaaagtttactacatctcagctgagttcttgattggtaaactcttgtcaaacaacttgattaaccttggtctttacgacgatgttaaaaaagaacttgcagctgcaggtaaagacttgatcgaagttgaagaagttgaattggaaccatctcttggtaatggtggtttgggacgtttggctgcctgctttatcgactcaattgctactcttggtttgaatggtgacggtgttggtcttaactaccactttggtcttttccaacaagttcttaaaaacaaccaacaagaaacaattccaaatgcatggttgacagagcaaaactggttggttcgctcaagccgtagctaccaagtaccatttgcagactttactttgacatcaactctttacgatattgatgttactggttatgaaacagcgactaaaaaccgcttgcgtttgtttgacttggattcagttgattcttctattattaaagatggtatcaactttgacaagacagatatcgctcgcaacttaactctcttcctttacccagatgatagtgaccgtcaaggtgaattgctccgtatcttccaacaatacttcatggtttcaaacggtgcgcaattgatcatcgacgaagcaatcgaaaaaggaagcaacttgcatgaccttgctgactacgcagttgtccaaatcaacgatactcacccatcaatggtgattcctgaattgattcgtcttttgactgcacgtggtatcgatcttgacgaagcaatctcaattgttcgtagcatgactgcctacactaaccacacaatccttgctgaagcgcttgaaaaatggcctcttgaattcttgcaagaagtggttcctcacttggtaccaatcatcgaagaattggaccgtcgtgtgaaggcagagtacaaagatccagctgttcaaatcatcgatgagagcggacgtgttcacatggctcacatggatatccactacggatacagtgttaacggggttgcagcactccatactgaaatcttgaaaaattctgagttgaaagccttctacgacctttacccagaaaagttcaacaacaaaacaaacggtatcactttccgtcgttggcttatgcatgctaacccaagattgtctcactacttggatgagattcttggagatggttggcaccatgaagcagatgagcttgaaaaacttttgtcttatgaagacaaagcagttgtcaaagaaaaattggaaagcatcaaggctcacaacaaacgtaaattggctcgtcacttgaaagaacaccaaggtgtggaaatcaatccaaattctatctttgatatccaaatcaaacgtcttcacgagtacaaacgccaacaaatgaacgctttgtacgtgatccacaaataccttgacatcaaagctggtaacatccctgctcgtccaatcacaatcttctttggtggtaaagcagctccagcctacacaatcgctcaagacattatccatttaatcctttgcatgtcagaagttattgctaacgatccagcagtagctccacacttgcaagtagttatggttgaaaactacaacgttactgcagcaagtttccttatcccagcatgtgatatctcagaacaaatctcacttgcttctaaagaagcttcaggtactggtaacatgaaattcatgttgaacggagctttgacacttggtactatggacggtgctaacgtggaaatcgctgagttggttggagaagaaaacatctacatcttcggtgaagattcagaaactgttatcgacctttacgcaaaagcagcttacaaatcaagcgaattctacgctcgtgaagctatcaaaccattggttgacttcatcgttagtgatgcagttcttgcagctggaaacaaagagcgcttggaacgtttttacaatgaattgatcaacaaagactggttcatgactcttcttgatttggaagactacatcaaagtcaaagagcaaatgcttgctgactacgaagaccgtgacgcatggttggataaagtcatcgttaacatttctaaagcaggattcttctcatctgaccgtacaatcgctcagtataacgaagacatctggcacttgaac

SEQ ID NO: 4400 - protein, 752 aa, Streptococcus pneumoniae
  glycogen phosphorylase family protein; Cellular location: membrane; Similar to strain R6 sequence 15903957 (0.E+01)
MLSLQEFVQNRYNKTIAECSNEELYLALLNYSKLASSQKPVNTGKKKVYYISAEFLIGKLLSNNLINLGLYDDVKKELAAAGKDLIEVEEVELEPSLGNGGLGRLAACFIDSIATLGLNGDGVGLNYHFGLFQQVLKNNQQETIPNAWLTEQNWLVRSSRSYQVPFADFTLTSTLYDIDVTGYETATKNRLRLFDLDSVDSSIIKDGINFDKTDIARNLTLFLYPDDSDRQGELLRIFQQYFMVSNGAQLIIDEAIEKGSNLHDLADYAVVQINDTHPSMVIPELIRLLTARGIDLDEAISIVRSMTAYTNHTILAEALEKWPLEFLQEVVPHLVPIIEELDRRVKAEYKDPAVQIIDESGRVHMAHMDIHYGYSVNGVAALHTEILKNSELKAFYDLYPEKFNNKTNGITFRRWLMHANPRLSHYLDEILGDGWHHEADELEKLLSYEDKAVVKEKLESIKAHNKRKLARHLKEHQGVEINPNSIFDIQIKRLHEYKRQQMNALYVIHKYLDIKAGNIPARPITIFFGGKAAPAYTIAQDIIHLILCMSEVIANDPAVAPHLQVVMVENYNVTAASFLIPACDISEQISLASKEASGTGNMKFMLNGALTLGTMDGANVEIAELVGEENIYIFGEDSETVIDLYAKAAYKSSEFYAREAIKPLVDFIVSDAVLAAGNKERLERFYNELINKDWFMTLLDLEDYIKVKEQMLADYEDRDAWLDKVIVNISKAGFFSSDRTIAQYNEDIWHLN

SEQ ID NO: 4401 - DNA, 1515 bp, Streptococcus pneumoniae
atgaaaaaacgtcaaagtggtgtgttgatgcacatctcttctcttccaggagcttacggaatcggatcatttggtcaaagtgcttacgacttcgttgatttcttggtccgtacaaaacaacgttactggcaaatccttccattaggagcaactagttacggggattctccttaccaatctttctcagccttcgcaggaaacactcattttatcgatttagatatcttggtggagcaaggtttgttggaagcaagtgaccttgaaggagttgactttggtagcgatgcgtctgaagttgactatgctaaaatctactatgcacgtcgtcctcttttagaaaaagcggtgaaacgtttctttgaagtcggagatgttaaagattttgagaaatttgctcaagacaaccaatcatggcttgagctctttgctgagtatatggctatcaaagagtattttgacaatcttgcttggactgaatggccagatgcagatgctcgtgctcgtaaagcttcagcacttgaaagctatcgtgagcaattggcagacaagttggtttaccaccgtgtgactcaatacttcttcttccaacaatggttgaaattgaaagcttacgctaacgacaaccacatcgaaatcgttggggacatgccaatctacgtagcggaagattcaagtgatatgtgggcaaatccacatctcttcaaaacagatgtcaatggtaaggctacttgtatcgcaggatgcccaccagatgagttttctgtaactggtcagctttggggtaatccaatctatgactgggaagcaatggacaaagacggctacaaatggtggattgaacgcttgcgtgaaagcttcaaaatctacgatatcgttcgtatcgaccacttccgtggcttcgaatcttactgggaaatccctgctggttccgatacagcagcacctggtgagtgggtgaaaggtccaggttacaagctttttgcagccgttaaggaagaacttggtgagctaaacatcatcgcagaagaccttggcttcatgacagatgaagtgatcgaattgcgtgaacgtactggcttcccaggaatgaagattcttcaatttgccttcaacccagaagacgaaagcattgatagcccacacttggcacctgctaactcagttatgtacacaggaacacacgataacaatacggttcttggttggtaccgtaatgagattgatgatgcgactcgtgagtacatggctcgttacacgaaccgtaaagaatacgaaacagtggtacacgctatgcttcgtacagtattttcatcagttagctttatggcaattgcaactatgcaagatttactagaattggatgaggcagctcgtatgaacttcccatctacccttggtggaaactggtcttggcgtatgactgaagatcaattgacaccagctgtcgaggaaggtttgcttgacttgacaacaatttatcgccgaattaatgaaaatttggtagatttaaagaaa

SEQ ID NO: 4402 - protein, 505 aa, Streptococcus pneumoniae
  4-alpha-glucanotransferase (malQ); Cellular location: cytoplasm; Similar to strain R6 sequence 15903958 (0.E+01)
MKKRQSGVLMHISSLPGAYGIGSFGQSAYDFVDFLVRTKQRYWQILPLGATSYGDSPYQSFSAFAGNTHFIDLDILVEQGLLEASDLEGVDFGSDASEVDYAKIYYARRPLLEKAVKRFFEVGDVKDFEKFAQDNQSWLELFAEYMAIKEYFDNLAWTEWPDADARARKASALESYREQLADKLVYHRVTQYFFFQQWLKLKAYANDNHIEIVGDMPIYVAEDSSDMWANPHLFKTDVNGKATCIAGCPPDEFSVTGQLWGNPIYDWEAMDKDGYKWWIERLRESFKIYDIVRIDHFRGFESYWEIPAGSDTAAPGEWVKGPGYKLFAAVKEELGELNIIAEDLGFMTDEVIELRERTGFPGMKILQFAFNPEDESIDSPHLAPANSVMYTGTHDNNTVLGWYRNEIDDATREYMARYTNRKEYETVVHAMLRTVFSSVSFMAIATMQDLLELDEAARMNFPSTLGGNWSWRMTEDQLTPAVEEGLLDLTTIYRRINENLVDLKK

SEQ ID NO: 4403 - DNA, 1269 bp, Streptococcus pneumoniae
atgtcatctaaatttatgaagagcgctgcggtgcttggaactgctacacttgctagcttgcttttggtagcttgcggaagcaaaactgctgataagcctgctgattctggttcatctgaagtcaaagaactcactgtatatgtagacgagggatataagagctatattgaagaggttgctaaagcttatgaaaaagaagctggagtaaaagtcactcttaaaactggtgatgctctaggaggtcttgataaactttctcttgacaaccaatctggtaatgtccctgatgttatgatggctccatacgaccgtgtaggtagccttggttctgacggacaactttcagaagtgaaattgagcgatggtgctaaaacagacgacacaactaaatctcttgtaacagctgctaatggtaaagtttacggtgctcctgccgttatcgagtcacttgttatgtactacaacaaagacttggtgaaagatgctccaaaaacatttgctgacttggaaaaccttgctaaagatagcaaatacgcattcgctggtgaagatggtaaaactactgccttcctagctgactggacaaacttctactatacatatggacttcttgccggtaacggtgcttacgtctttggccaaaacggtaaagacgctaaagacatcggtcttgcaaacgacggttctatcgtaggtatcaactacgctaaatcttggtacgaaaaatggcctaaaggtatgcaagatacagaaggtgctggaaacttaatccaaactcaattccaagaaggtaaaacagctgctatcatcgacggaccttggaaagctcaagcctttaaagatgctaaagtaaactacggagttgcaactatcccaactcttccaaatggaaaagaatatgctgcattcggtggtggtaaagcttgggtcattcctcaagccgttaagaaccttgaagcttctcaaaaatttgtagacttccttgttgcaactgaacaacaaaaagtattatatgataagactaacgaaatcccagctaatactgaggctcgttcatacgctgaaggtaaaaacgatgagttgacaacagctgttatcaaacagttcaagaacactcaaccactgccaaacatctctcaaatgtctgcagtttgggatccagcgaaaaatatgctctttgatgctgtaagtggtcaaaaagatgctaaaacagctgctaacgatgctgtaacattgatcaaagaaacaatcaaacaaaaatttggtgaa

SEQ ID NO: 4404 - protein, 423 aa, Streptococcus pneumoniae
  maltose/maltodextrin ABC transporter, maltose/maltodextrin-binding prot; Cellular location: lipoprotein; Similar to strain R6 sequence 15903959 (0.E+01)
MSSKFMKSAAVLGTATLASLLLVACGSKTADKPADSGSSEVKELTVYVDEGYKSYIEEVAKAYEKEAGVKVTLKTGDALGGLDKLSLDNQSGNVPDVMMAPYDRVGSLGSDGQLSEVKLSDGAKTDDTTKSLVTAANGKVYGAPAVIESLVMYYNKDLVKDAPKTFADLENLAKDSKYAFAGEDGKTTAFLADWTNFYYTYGLLAGNGAYVFGQNGKDAKDIGLANDGSIVGINYAKSWYEKWPKGMQDTEGAGNLIQTQFQEGKTAAIIDGPWKAQAFKDAKVNYGVATIPTLPNGKEYAAFGGGKAWVIPQAVKNLEASQKFVDFLVATEQQKVLYDKTNEIPANTEARSYAEGKNDELTTAVIKQFKNTQPLPNISQMSAVWDPAKNMLFDAVSGQKDAKTAANDAVTLIKETIKQKFGE

SEQ ID NO: 4405 - DNA, 1305 bp, Streptococcus pneumoniae
atgaaaggagttaatatggaaaagcaacaacctagtaaagcagccctgctgtctatcattcctgggttaggacagatttacaataaacaaaaagccaaaggttttatcttccttggtgtaaccatcgtatttgtcctttacttcctagcacttgcaacccctgaattgagcaacctcatcactcttggtgacaaaccaggtcgtgataattccctctttatgctgattcgtggtgccttccatctaatctttgtaatcgtttatgtactcttttatttctcaaatatcaaagatgcacatacgattgcaaaacgcattaacaatggaattccagttccacgcacactcaaagacatgatcaaagggatttatgaaaatggcttcccttacctcttgatcattccatcttatgttgccatgaccttcgcgattatcttcccagttatcgtaaccttgatgatcgcctttaccaactacgacttccaacacttgccaccaaacaagttgttggactgggttggtttgaccaactttacaaacatttggagcttgagtaccttccgttctgcctttggttctgttctttcttggactatcatttgggctttggcagcttctactttacaaatcgtaattggtatcttcacagctatcattgccaaccaaccatttatcaaaggaaaacgtatctttggtgttattttccttcttccttgggctgtcccagccttcatcactatcttgacattctcaaacatgtttaacgatagtgtcggtgctatcaacactcaagtattgccaatcttggctaaattccttcctttccttgatggagctcttattccttggaaaacagacccaacttggactaagattgccttgattatgatgcaaggttggctcggattcccatacatctacgttctgaccttgggtatcttgcaatctattcctaacgacctttacgaagcagcttatattgacggtgccaacgcttggcaaaaattccgcaacatcactttcccaatgattttggctgttgcggcacctactttgattagccaatacaccttcaactttaacaacttctctatcatgtacctcttcaatggtggaggacctggtagtgtcggaggtggagctggttcaaccgatatcttgatctcatggatctaccgtttgacaacaggtacatctcctcaatactcaatggcggcagctgttaccttgattatctctatcattgtcatctcaatctctatgatcgcattcaagaaactacacgcatttgatatggaggacgtc

SEQ ID NO: 4406 - protein, 435 aa, Streptococcus pneumoniae
  maltodextrin ABC transporter, permease protein (malC); Cellular location: membrane; Similar to strain R6 sequence 15903960 (0.E+01)
MKGVNMEKQQPSKAALLSIIPGLGQIYNKQKAKGFIFLGVTIVFVLYFLALATPELSNLITLGDKPGRDNSLFMLIRGAFHLIFVIVYVLFYFSNIKDAHTIAKRINNGIPVPRTLKDMIKGIYENGFPYLLIIPSYVAMTFAIIFPVIVTLMIAFTNYDFQHLPPNKLLDWVGLTNFTNIWSLSTFRSAFGSVLSWTIIWALAASTLQIVIGIFTAIIANQPFIKGKRIFGVIFLLPWAVPAFITILTFSNMFNDSVGAINTQVLPILAKFLPFLDGALIPWKTDPTWTKIALIMMQGWLGFPYIYVLTLGILQSIPNDLYEAAYIDGANAWQKFRNITFPMILAVAAPTLISQYTFNFNNFSIMYLFNGGGPGSVGGGAGSTDILISWIYRLTTGTSPQYSMAAAVTLIISIIVISISMIAFKKLHAFDMEDV

SEQ ID NO: 4407 - DNA, 861 bp, Streptococcus pneumoniae
ttgatatggaggacgtctaagatgaataactcaattaaactcaaacgtagactgactcaaagccttacttacctttacctgattggtctatcaattgtaattatctatccactgttgattaccattatgtcagcctttaaagcaggtaacgtctcagcctttaaactagatactaatatcgacctcaattttgataactttaaaggcctcttcactgaaaccttgtacggtacttggtacctcaacactttgattatcgccttaattaccatggctgttcaaacaagtatcatcgtacttgctggttatgcttacagccgttacaacttcttggctcgtaaacaaagtttggtcttcttcttgatcatccaaatggtgccaactatggccgctttgacagccttcttcgttatggcgcttatgttgaacgcccttaaccacaactggttcctcatcttcctctacgttggtggtggtatcccgatgaatgcttggctcatgaaaggctacttcgatacagtgccaatgtctttagacgaatctgcaaaactagacggtgcaggacacttccgccgcttctggcaaattgttctaccacttgttcgcccaatggttgccgtacaagctctctgggccttcatgggacctttcggggactacatcctctctagtttcttgcttcgtgagaaagaatactttactgttgccgtaggtctccaaaccttcgttaacaatgcgaaaaacttgaagattgcctacttctcagcaggtgctatcctcatcgcccttccaatctgtattctcttcttcttcctacaaaagaactttgtttcaggacttacaagtggtggcgacaaggga

SEQ ID NO: 4408 - protein, 287 aa, Streptococcus pneumoniae
  maltodextrin ABC transporter, permease protein (malD); Cellular location: membrane; Similar to strain R6 sequence 15903961 (e-159)
MIWRTSKMNNSIKLKRRLTQSLTYLYLIGLSIVIIYPLLITIMSAFKAGNVSAFKLDTNIDLNFDNFKGLFTETLYGTWYLNTLIIALITMAVQTSIIVLAGYAYSRYNFLARKQSLVFFLIIQMVPTMAALTAFFVMALMLNALNHNWFLIFLYVGGGIPMNAWLMKGYFDTVPMSLDESAKLDGAGHFRRFWQIVLPLVRPMVAVQALWAFMGPFGDYILSSFLLREKEYFTVAVGLQTFVNNAKNLKIAYFSAGAILIALPICILFFFLQKNFVSGLTSGGDKG

SEQ ID NO: 4409 - DNA, 798 bp, Streptococcus pneumoniae
atgcttccatatccattttcctatttttcaagtatttggggggttcgtaagcccctgtccaaacgtttcgagctcaactggtttcaacttctctttaccagtatcttccttatcagcttgtctatggtacccattgctatccaaaacagctcccaggagacctatccgctagaaacttttatcgataatgtctatgaacctctgacagataaggttgtccaggatctctctgaacatgctacaattgtcgatggcacattaacttatactggaacagctagtcaagccccttctgttgtgattggtccaagtcaaatcaaggaattacctaaggacttgcaactgcatttcgatacaaatgagctagtcatcagcaaggaaagcaaggaactgacccgcatctcttaccgagccattcagactgagagtttcaaaagcaaagacagcttgacccaagcaatttctaaagactggtaccaacaaaatcgtgtctatatcagcctcttcctagttctcggtgcgagcttcctctttggtttgaatttctttatcgtctctcttggagctagctttctcctttatatcaccaaaagatcacgcctcttttcatttaatacctttaaagagtgctaccattttatcttgaactgtttaggattgccgactctgattacacttattttgggattatttggccaaaatatgacaaccctgattactgtacaaaatattctttttgttctgtatctggtcactatcttttataaaacacatttccgtgatccaaattaccataaa

SEQ ID NO: 4410 - protein, 266 aa, Streptococcus pneumoniae
  malA protein; Cellular location: membrane; Similar to strain R6 sequence 15903962 (e-149)
MLPYPFSYFSSIWGVRKPLSKRFELNWFQLLFTSIFLISLSMVPIAIQNSSQETYPLETFIDNVYEPLTDKVVQDLSEHATIVDGTLTYTGTASQAPSVVIGPSQIKELPKDLQLHFDTNELVISKESKELTRISYRAIQTESFKSKDSLTQAISKDWYQQNRVYISLFLVLGASFLFGLNFFIVSLGASFLLYITKRSRLFSFNTFKECYHFILNCLGLPTLITLILGLFGQNMTTLITVQNILFVLYLVTIFYKTHFRDPNYHK

SEQ ID NO: 4411 - DNA, 984 bp, Streptococcus pneumoniae
atgcccgttacgattaaagacgtggccaaggctgctggtgtttcgccttcaaccgtaacccgtgttattcaaaataaatcaaccattagcgacgaaacaaaaaaacgtgttcgcaaagctatgaaggaactcaactaccacccaaacctcaacgctcgtagcttggtaagcagctatactcaggttatcggattagttcttcctgatgactcagacgccttctaccagaatcctttctttccatcggttctacgtggcatctctcaagtcgcatctgaaaaccactatgccattcagatagcaacagggaaagatgagaaggagcgtctcaacgctatttcacaaatggtctacggcaagcgtgtagatgggctaatttttctctatgcccaagaagaagaccctctcgtaaaactcgtcgcagaagaacagttccccttccttatcttaggtaaatctctatctcctttcatcccacttgtcgacaacgacaatgttcaagctggttttgatgcgactgaatatttcatcaaaaaaggctgcaaacgcattgcctttatcggaggaagtaaaaagctcttcgtgaccaaagaccgtttaacaggctatgaacaggcgcttaaacattacaaacttaccactgacaacaatcgcatctactttgccgacgagtttctggaagaaaagggctataaatttagcaagcgattattcaagcacgatccacaaattgatgctatcatcacaaccgatagcctcctagctgaaggtgtttgtaactatattgccaaacaccagctggatgtccctgttctcagctttgactcggttaatcccaagctcaacttggcagcctatgtcgatatcaatagtttagagcttggtcgtgtttcccttgaaactattctccagattattaatgataataaaaacaataaacaaatttgttaccgtcaattgatcgcccacaaaattatcgaaaaa

SEQ ID NO: 4412 - protein, 328 aa, Streptococcus pneumoniae
  maltose operon transcriptional repressor (malR); Cellular location: cytoplasm; Similar to strain R6 sequence 15903963 (0.E+01)
MPVTIKDVAKAAGVSPSTVTRVIQNKSTISDETKKRVRKAMKELNYHPNLNARSLVSSYTQVIGLVLPDDSDAFYQNPFFPSVLRGISQVASENHYAIQIATGKDEKERLNAISQMVYGKRVDGLIFLYAQEEDPLVKLVAEEQFPFLILGKSLSPFIPLVDNDNVQAGFDATEYFIKKGCKRIAFIGGSKKLFVTKDRLTGYEQALKHYKLTTDNNRIYFADEFLEEKGYKFSKRLFKHDPQIDAIITTDSLLAEGVCNYIAKHQLDVPVLSFDSVNPKLNLAAYVDINSLELGRVSLETILQIINDNKNNKQICYRQLIAHKIIEK

SEQ ID NO: 4413 - DNA, 237 bp, Streptococcus pneumoniae
ttgaaaaaacttgatactatgcgttttattgtgggaagatttacttccttttctactgaaattgagtcttttcccaagatctttttatactcaatgaaaatcaaagtgcaaactaggaagctagccgcaggttgctcaaaacactgttttgaggttgtagatgaaactgacgaagtcagtaaccatacctacggcaaggtgaagctgacgtggtttgaagagattttcgaagagtat

SEQ ID NO: 4414 - protein, 79 aa, Streptococcus pneumoniae
  box element
MKKLDTMRFIVGRFTSFSTEIESFPKIFLYSMKIKVQTRKLAAGCSKHCFEVVDETDEVSNHTYGKVKLTWFEEIFEEY

SEQ ID NO: 4415 - DNA, 939 bp, Streptococcus pneumoniae
atgaaacaaacaaaacgaattaagcggtggcgctattatctgcgccgctttgcttatcagataaaaattttacgtgtcttacaaagtatctctcgagaaaagtatgatgagaagatttcggcctctctggtctatggttttttatcagcagtagcagttaatttctttttccaaccagggcatgtgtattcgagtggtgcaacaggtctggcacagattatctctgccttgagtaatcactggtttggttttcatattccgatttcgctaagcttctacgccattaacttccctttgatggtcttagcttggtatcagattggccataagttcaccgtctttacctttatcacggtatctatgagttccttctttatccagtttgtccctgtggcaaccttgacagaggatcccattatcaattccctttttgggggtgttgttatgggtttggggattggttttgctcttcgaaacaatatctccagtggtgggacggatatcgtcagcctgactattcgtaagaaaacgggtaagaatgtcggtagtatttctttcttggtaaatggaactatcatgctgatagcaggtttgacctttggttggaaatacgctctttattctatgattaccatctttgtctctagccgtgtgacagacgcagtctttactaagcaaaagcgtatgcaggccatgattgtgacaaatcatccagagaaggtaattgaaaaaatccataaaaaattgcaccgcggagcaaccatgatccacgatgcagaaggaacctataatcacgagagaaaggcagttttaatcactgtcattacacgtgcagagtttaatgaatttaaacagattatgacacaagtggatccaagctcctttgtctctgtctcggaaaatgttcatattctaggaagatttgttgagatagataat

SEQ ID NO: 4416 - protein, 313 aa, Streptococcus pneumoniae
  conserved hypothetical protein; Cellular location: membrane; Similar to strain R6 sequence 15903964 (e-178)
MKQTKRIKRWRYYLRRFAYQIKILRVLQSISREKYDEKISASLVYGFLSAVAVNFFFQPGHVYSSGATGLAQIISALSNHWFGFHIPISLSFYAINFPLMVLAWYQIGHKFTVFTFITVSMSSFFIQFVPVATLTEDPIINSLFGGVVMGLGIGFALRNNISSGGTDIVSLTIRKKTGKNVGSISFLVNGTIMLIAGLTFGWKYALYSMITIFVSSRVTDAVFTKQKRMQAMIVTNHPEKVIEKIHKKLHRGATMIHDAEGTYNHERKAVLITVITRAEFNEFKQIMTQVDPSSFVSVSENVHILGRFVEIDN

SEQ ID NO: 4417 - DNA, 1761 bp, Streptococcus pneumoniae
atgaaacgtagtatgtatgctggtcgtgttcgtgaggaacacatcggacaagaaataaccttgaaaggatgggttggccgtcgtcgtgaccttggtggtttgatctttatcgatcttcgtgaccgtgaaggaatcatgcagttggttatcaaccctgaaaaagtatctgcagaggttatggcaacagctgaaagccttcgtagcgaatttgttattgaggtgactggtcaggtcgctgcgcgtgagcaagccaatgataagttgccaactggtgcggttgagttaaacgtgacagctcttattgtgcttaacacagctaagacaacaccatttgagattaaggatggcattgaggcaaatgacgatacacgtttgcgttaccgttaccttgaccttcgtcgtccagaaatgttggaaaatcttaaacttcgtgccaaggtgacccactctatccgcaactacttggatgagttggagtttatcgacgtggagacaccattcctttctaagtcaacgcctgaaggggcgcgtgattatttagtgccgtctcgtgttaataaggggcatttttacgctcttcctcaaagtccacaaatcacgaaacagctcttgatgaatgctggttttgaccgttactaccaaatcgttaaatgtttccgtgacgaggacttgcgtggagaccgccagcctgaatttactcaggtcgacttggaaacgtccttccttactgagcaagaaatccaagatattacagaaagcttgatcgcgcgcgtgatgaaggaaacaaaaggcatcgaagtaacgctaccattccctcgtatgaaatacgatgatgctatggctctttacggttctgacaagccagatactcgttttgacatgttgcttcaggacttgacagaagtggtccgaggtgtagactttaaagtcttttcagaagcacctgctgtaaaagcgattgtggtcacaggagctgcggacaactattcacgtaaagacatcgacaagatgacggaagtagccaaacagtatggtgccaaaggtcttgcttgggtcaaggtggttgatggagaattaaacggaccagttgccaagttcttgactggtatccaagaagaattgacaacagcgcttgttcttgaagataaggacttggttctctttgtggcggatacgcttgaagtggctaatgcaacactgggtgcccttcgtggacgtattgctaaagagcttggcttgattgataatgataagttcaacttcctttgggtggttgactggccgatgtttgaatggtctgaagaagaaggccgctacatgagcgcccaccatcctttcacacttccacaggaagagactgctcatgaattagaaggtgatttggctaaggttcgtgccattgcttacgatatcgtcttgaacggttatgagcttggtggtggtagccttcgtatcaaccaaaaagaccttcaagaacgcatgttcaaggctcttggtttctcaactgaagaagccaatgaccagtttggtttccttcttgaagccatggactatggtttcccaccacacggtggtttggctatcgggcttgaccgttttgtcatgttgcttgctggagaagaaaatatccgtgaagtcattgcctttcctaagaacaacaaggcaactgacccaatgacacaagctccatcaacagtcgctctcaaacaactagaggaactcagcttacaagtagaagaagatgaaacaaacaaaacgaat

SEQ ID NO: 4418 - protein, 587 aa, Streptococcus pneumoniae
  aspartyl-tRNA synthetase (aspS); Cellular location: cytoplasm; Similar to strain R6 sequence 15903965 (0.E+01)
MKRSMYAGRVREEHIGQEITLKGWVGRRRDLGGLIFIDLRDREGIMQLVINPEKVSAEVMATAESLRSEFVIEVTGQVAAREQANDKLPTGAVELNVTALIVLNTAKTTPFEIKDGIEANDDTRLRYRYLDLRRPEMLENLKLRAKVTHSIRNYLDELEFIDVETPFLSKSTPEGARDYLVPSRVNKGHFYALPQSPQITKQLLMNAGFDRYYQIVKCFRDEDLRGDRQPEFTQVDLETSFLTEQEIQDITESLIARVMKETKGIEVTLPFPRMKYDDAMALYGSDKPDTRFDMLLQDLTEVVRGVDFKVFSEAPAVKAIVVTGAADNYSRKDIDKMTEVAKQYGAKGLAWVKVVDGELNGPVAKFLTGIQEELTTALVLEDKDLVLFVADTLEVANATLGALRGRIAKELGLIDNDKFNFLWVVDWPMFEWSEEEGRYMSAHHPFTLPQEETAHELEGDLAKVRAIAYDIVLNGYELGGGSLRINQKDLQERMFKALGFSTEEANDQFGFLLEAMDYGFPPHGGLAIGLDRFVMLLAGEENIREVIAFPKNNKATDPMTQAPSTVALKQLEELSLQVEEDETNKTN

SEQ ID NO: 4419 - DNA, 189 bp, Streptococcus pneumoniae
atgaaaatcaaagagcaaactaggaagctagccgcaggttgctcaaaacactgttttgaggttgtggatagaactgacgaagtcagctcaaaacatggttttgaggttgtagatgaaactgacgaagtcagtaaccatacatacggtaaggcgacgctgacgtggtttgaagagattttcgaagagtat

SEQ ID NO: 4420 - protein, 63 aa, Streptococcus pneumoniae
  box element
MKIKEQTRKLAAGCSKHCFEVVDRTDEVSSKHGFEVVDETDEVSNHTYGKATLTWFEEIFEEY

SEQ ID NO: 4421 - DNA, 96 bp, Streptococcus pneumoniae
atgaacttcaccggactcttttattttgaatttttgcctgctttacgcttttcagcgatttcggctgcctttcgaggcaagacaatttccgttatg

SEQ ID NO: 4422 - protein, 32 aa, Streptococcus pneumoniae
  hypothetical protein
MNFTGLFYFEFLPALRFSAISAAFRGKTISVM

SEQ ID NO: 4423 - DNA, 228 bp, Streptococcus pneumoniae
atgaaacgagtaattttattagcagtgattcaggcagtcgttctatttttcatcattggagcgctagcttatgccttcaaaggcgatttcttctataactatctagcagttgtctttgctcctattgcaggtgtactgcgttttgggacggcttacataacggaaattgtcttgcctcgaaaggcagccgaaatcgctgaaaagcgtaaagcaggcaaaaattcaaaa

SEQ ID NO: 4424 - protein, 76 aa, Streptococcus pneumoniae
  hypothetical protein; Cellular location: membrane; Similar to strain R6 sequence 15903966 (1.E-37)
MKRVILLAVIQAVVLFFIIGALAYAFKGDFFYNYLAVVFAPIAGVLRFGTAYITEIVLPRKAAEIAEKRKAGKNSK

SEQ ID NO: 4425 - DNA, 639 bp, Streptococcus pneumoniae
atgaaattacttaaaaaccttggctggattcttctagcccttctatcctttttatttatctatggctttattcaggggctcgcgactgcgtcgcttgctttaggcgcttcaccctatgctgttactctactctatgtggccttggctggagtatatgtgtacggcatttacaaatggtatcagaaggctcctgttcatattgagaagagcggctttaatcgatttatttggcttcctgtcttggtttggttcttatctctggtcgttcaattcttcttgccagatgatccttcagtaaatcagcaaatagcgacagacttgaccttgtctcaaccacttttctcattctttgctgtggttatttttgctcctttgacggaagagattgtttttagagggatgttagcacgctatctctttcctaagcaggacaatagtaaacgaaccctgatttttcttctggtatctagtcttctatttgccttgattcattttccaggtgatgtgcaacaattttttgtctattttagccttggttttagtttgggtttggcttacattagcagaaaaggtctggtctacagtatttctcttcacgctttgaataatttagtcggctttttgatgattctcatgcta

SEQ ID NO: 4426 - protein, 213 aa, Streptococcus pneumoniae
  conserved domain protein; Cellular location: membrane; Similar to strain R6 sequence 15903967 (e-118)
MKLLKNLGWILLALLSFLFIYGFIQGLATASLALGASPYAVTLLYVALAGVYVYGIYKWYQKAPVHIEKSGFNRFIWLPVLVWFLSLVVQFFLPDDPSVNQQIATDLTLSQPLFSFFAVVIFAPLTEEIVFRGMLARYLFPKQDNSKRTLIFLLVSSLLFALIHFPGDVQQFFVYFSLGFSLGLAYISRKGLVYSISLHALNNLVGFLMILML

SEQ ID NO: 4427 - DNA, 678 bp, Streptococcus pneumoniae
ttgggcatgtttgtagggatgtttaaggcacgtgtcgaatcccacgaaattattttagatgtaaaagccttgatgccatggatatcagctatttgtttactgataggtttcattagtatgtttttgactttcaatttcttaaagaaaagcagaaaatttcattctttgtatcaagaggaaatggatgacgatctgaatgaaacctattatgtgcaaatgtatcggaatcttgagtttggaaccattgcttttaatattacaggtgtagcgattccattggctatttttatttcattaagtgaggtgattatattgcatacaaaccctcaaacatttttcctttctttcttactctttgtggtattcttagtcgctcaaaaatctctttttaaaaccattgcgattgttcgtcagtttgatttggaatttttcgctacaccaaaggatgtcttgaactatataaattcttatgatgaaggggagcgtcaggctaatttggaacagagttttcgaattttattccaattacaccaatatgtcttaccagccttatatatttttcttattatcatttctttcttgacaggagagattcagttactagctttcttgcttgtaggagccatccatgtttatatcaatgtgatgcagttacctatggtaaaacgttatttcaaa

SEQ ID NO: 4428 - protein, 226 aa, Streptococcus pneumoniae
  hypothetical protein; Cellular location: membrane; Similar to strain R6 sequence 15903968 (e-126)
MGMFVGMFKARVESHEIILDVKALMPWISAICLLIGFISMFLTFNFLKKSRKFHSLYQEEMDDDLNETYYVQMYRNLEFGTIAFNITGVAIPLAIFISLSEVIILHTNPQTFFLSFLLFVVFLVAQKSLFKTIAIVRQFDLEFFATPKDVLNYINSYDEGERQANLEQSFRILFQLHQYVLPALYIFLIIISFLTGEIQLLAFLLVGAIHVYINVMQLPMVKRYFK

SEQ ID NO: 4429 - DNA, 198 bp, Streptococcus pneumoniae
gtgatgaacaagtataaagtgatttattatgtagtggtcatagctttattagtcagcgtatttctactgattgggatggacctaagctggtttaatccctatcaaagcgaccaatttgtttgggtctactttgctctcatcccagtaattgaatggattgaaaagaaatccaaaaatctagcaagtgaaaaaggagaa

SEQ ID NO: 4430 - protein, 66 aa, Streptococcus pneumoniae
  hypothetical protein; Cellular location: membrane; Similar to strain R6 sequence 15903969 (1.E-34)
MMNKYKVIYYVVVIALLVSVFLLIGMDLSWFNPYQSDQFVWVYFALIPVIEWIEKKSKNLASEKGE

SEQ ID NO: 4431 - DNA, 213 bp, Streptococcus pneumoniae
gtgtgtaacatgcaactaaaaaatcgtctaaaagagcttcgagctcgcgatggtctcaatcaaaccgacctagccaaactggcaggggtttccagacagaccattagcctactagaacgggatgagtacaccccatccattatcattgccctgaaaatatctcaaattttcaacgaaacagtcgaatcggtatttcgtttggaggaggacgag

SEQ ID NO: 4432 - protein, 71 aa, Streptococcus pneumoniae
  transcriptional regulator, putative; Cellular location: cytoplasm; Similar to strain R6 sequence 15903970 (1.E-34)
MCNMQLKNRLKELRARDGLNQTDLAKLAGVSRQTISLLERDEYTPSIIIALKISQIFNETVESVFRLEEDE

SEQ ID NO: 4433 - DNA, 465 bp, Streptococcus pneumoniae
atgatagataaagtggtcaggaacctactcctgacctttttcttttgcaaaatgacaaaaatcataatttttttgacaactatacttgtcaaaaagaaaaagatatgttacaatgaattcaagttaagaaataggaagcagaaaggagttataatgtgggtactaggatttatactatttatgattttcttttattctaataattctaaaaaaatcaagaaactagagaataaaatcaaaagacttgagcgaaaagagaaaggaaacgcagaaatgtcgagattattacaagaaatgattggaaaggaaccaattataacgggagtgtatattgggccagataactgggaagttgtggatgttgatgaggaatgggtaaagctacgacgtgtagataatacgggaaaagaaaaattcaagttgcaacgtattgaggatatccaaaccgttgaatttgacggagag

SEQ ID NO: 4434 - protein, 155 aa, Streptococcus pneumoniae
  hypothetical protein; Cellular location: membrane; Similar to strain R6 sequence 15903971 (2.E-76)
MIDKVVRNLLLTFFFCKMTKIIIFLTTILVKKKKICYNEFKLRNRKQKGVIMWVLGFILFMIFFYSNNSKKIKKLENKIKRLERKEKGNAEMSRLLQEMIGKEPIITGVYIGPDNWEVVDVDEEWVKLRRVDNTGKEKFKLQRIEDIQTVEFDGE

SEQ ID NO: 4435 - DNA, 216 bp, Streptococcus pneumoniae
gtggatagaactgacgaagtcagctcaaaacatggttttgaggttgtggatagaactgacgaagtcagctcaaaacatggttttgaggttgtggatagaactgacgaagtcagctcaaaacatggttttgaggttgtagatgaaactgacgaagtcagtaaccatacctacggcaaggtgaagctgacgtggtttgaagagattttagaagagtat

SEQ ID NO: 4436 - protein, 72 aa, Streptococcus pneumoniae
  box element
MDRTDEVSSKHGFEVVDRTDEVSSKHGFEVVDRTDEVSSKHGFEVVDETDEVSNHTYGKVKLTWFEEILEEY

SEQ ID NO: 4437 - DNA, 1287 bp, Streptococcus pneumoniae
atgaaattacaaaaaccaaaaggaacgcaggatattttacctgctgagtctgctaagtggcagtacgttgagggctttgcccgtgagattttcaaacgctacaactatgcagaagtgcgcacgcctatttttgagcattacgaggttatcagtcgctctgtcggagatacaacggatatcgtaaccaaggaaatgtacgatttttatgacaagggtgaccgtcatattaccctccgtccagaaggaactgcacccgttgtccgttcctatgtggaaaataaacttttcgccccagaagtgcaaaagccaagcaagttctactacatgggacctatgttccgttatgagcgtccacaggcagggcgcttgcgccaattccaccagattggtgttgagtgttttggctctagcaatccagctaccgatgtggaaacaatcgctatggcagcccattttttgaaggaaatcggtattcaaggtgtcaaattgcacctcaacactcttggaaatcctgagagccgtgcagcctaccgccaagccttgattgactatttgacaccgctcaaggagaccttgtctaaggatagccaacgtcgcttggaggaaaatcctcttcgtgtcttggactctaaggaaaaagaagacaaggtggcagtagagaatgcgccgtctatcttggactttcttgatgaagaaagccaagctcattttgatgctgtgcgtcagatgttggaaaatcttggagtagattacatcatcgataccaatatggtgcgtggtctggactactacaaccacaccattttcgagtttatcacagagattgagggcaatgacctgaccgtctgtgcgggtggtcgctacgatggtttggttgcttactttggaggccctgaaactgctggatttggttttggacttggtgtagagcgcctgcttctcatccttgaaaagcaaggtgtgaccctccctatcgaaaacgccctagatgtctatatcgcagtcttgggcgaaggggcaaatatcaaggccttggaattggtacaggctcttcgccaacaaggtttcaaagcagagcgtgattacctcaaccgtaaactaaaagctcagttcaagtcagccgatgtctttgcggctaagaccctcatcaccctaggagagagcgaagtcgaaagcggacaagtgacggtcaagaacaaccaaacccgagaagaagtgcaagtgtcacttgagacaatcagccaaaacttctcagaaatctttgaaaaactaggattttatactcaa

SEQ ID NO: 4438 - protein, 429 aa, Streptococcus pneumoniae
  histidyl-tRNA synthetase (hisS); Cellular location: cytoplasm; Similar to strain R6 sequence 15903972 (0.E+01)
MKLQKPKGTQDILPAESAKWQYVEGFAREIFKRYNYAEVRTPIFEHYEVISRSVGDTTDIVTKEMYDFYDKGDRHITLRPEGTAPVVRSYVENKLFAPEVQKPSKFYYMGPMFRYERPQAGRLRQFHQIGVECFGSSNPATDVETIAMAAHFLKEIGIQGVKLHLNTLGNPESRAAYRQALIDYLTPLKETLSKDSQRRLEENPLRVLDSKEKEDKVAVENAPSILDFLDEESQAHFDAVRQMLENLGVDYIIDTNMVRGLDYYNHTIFEFITEIEGNDLTVCAGGRYDGLVAYFGGPETAGFGFGLGVERLLLILEKQGVTLPIENALDVYIAVLGEGANIKALELVQALRQQGFKAERDYLNRKLKAQFKSADVFAAKTLITLGESEVESGQVTVKNNQTREEVQVSLETISQNFSEIFEKLGFYTQ

SEQ ID NO: 4439 - DNA, 1245 bp, Streptococcus pneumoniae
atgaaactattgtttagaaatccagcttatagaattttgactttatcacgcttcttcaatgcttttggtgtttcgattttcaacctggtctttatcgtctatgcatcgaccttgtcacaagcatcttttgctgttgctatggcgaatattgtcatgattcttccgaccctctttacagtttttgcagggattcgggcagattacacgagggacaaggtcaaatggatggtctatagcggtttgtttcaggcggttctattttttctagcagccctagttgttcagcaagctagtctctttgccttttctagcctgtgtttgatcaatgtcattagtgatatcatcagtgattttgcaggtggcctgcgtatgcctcttattaaggaaaaagtagctgaagatgatctgatggaggcttattctttttcacagttcatcacctatatttcagctattggtggtcaagctttcggagtctggctcttagctctatcggtcaacaatttttctctcgttgcgggaatcaatgcctgctttttcctagtatcagccactatcctctttttaggaaaaagcaaattgagcctgtcaatgtcatctgctgatggtgaaaacttaaaaaatgagaagctttctatcaaagaccagttcctaacaatttaccgaaatttacgtctcgtttttcttaaaagtggacagaaaaactttggttttatgctctttgctgtcttgcttattaattccttgggtggcgctttgggtggaatttataatatcttctttttgagccattctctcttgaatttttcttatacagaggcactatttatcaatcaattctgtgttttagtatcagtcatcatcagtagccttacgggcaatgattattttgggaagcagtccttgcctagattgatgatgtgggagaccgtaggacttagtctagttggtttggctaatttattcaatcaagtcgtgcttggtttgctatttctcttctttactctgtatgtgtctggtaaagttcaaccaaagattagtgccatgctcatgaaaaatctagctccagaggttctagctcgtactagtaattttttaggtctattgtttaccttatccatacctgtgggaacagcttgtttttcactagtagccgtatggaatatacagttgacttggatgctatttgttggtctttccttgctagctatttttttgacaattcttaatctcaaaaatgatatc

SEQ ID NO: 4440 - protein, 415 aa, Streptococcus pneumoniae
  conserved hypothetical protein; Cellular location: membrane; Similar to strain R6 sequence 15903973 (0.E+01)
MKLLFRNPAYRILTLSRFFNAFGVSIFNLVFIVYASTLSQASFAVAMANIVMILPTLFTVFAGIRADYTRDKVKWMVYSGLFQAVLFFLAALVVQQASLFAFSSLCLINVISDIISDFAGGLRMPLIKEKVAEDDLMEAYSFSQFITYISAIGGQAFGVWLLALSVNNFSLVAGINACFFLVSATILFLGKSKLSLSMSSADGENLKNEKLSIKDQFLTIYRNLRLVFLKSGQKNFGFMLFAVLLINSLGGALGGIYNIFFLSHSLLNFSYTEALFINQFCVLVSVIISSLTGNDYFGKQSLPRLMMWETVGLSLVGLANLFNQVVLGLLFLFFTLYVSGKVQPKISAMLMKNLAPEVLARTSNFLGLLFTLSIPVGTACFSLVAVWNIQLTWMLFVGLSLLAIFLTILNLKNDI

SEQ ID NO: 4441 - DNA, 111 bp, Streptococcus pneumoniae
ttgccagacatttccattagaaaatcagatttacgtaccatttctcgtacatatctagtaaaaagagaaacagataaaaatggagaactgactgaaaataaattgagttca

SEQ ID NO: 4442 - protein, 37 aa, Streptococcus pneumoniae
  hypothetical protein
MPDISIRKSDLRTISRTYLVKRETDKNGELTENKLSS

SEQ ID NO: 4443 - DNA, 483 bp, Streptococcus pneumoniae
atgaagagcatagatgaaagggtagacttaacagcagaggaaggaaaagtccttcatgattatttgttttctaccgagatctggggaatctatgaactcaatttattttcagtcagttctccatttttatctgtttctctttttactagatatgtacgagaaatggtacgtaaatctgattttctaatggaaatgtctggcaatcgaaacctttttcatactatactattgaatggctttttagctagtattgagtgtgaagaatttaccaatgcctattattttaaacgtgttatcgaagagcatttctacaaggaaaatgagacctatttccgaattgtttatctgtgggcagaaggtctccttgatagcaagcaaggtagagtcaaggaaggccagaaaaagatggaggatgctgtccgtatttttgagatgcttggctgtaataaatctgccgaatactatagaaaaactcccgattct

SEQ ID NO: 4444 - protein, 161 aa, Streptococcus pneumoniae
  rgg protein, putative
MKSIDERVDLTAEEGKVLHDYLFSTEIWGIYELNLFSVSSPFLSVSLFTRYVREMVRKSDFLMEMSGNRNLFHTILLNGFLASIECEEFTNAYYFKRVIEEHFYKENETYFRIVYLWAEGLLDSKQGRVKEGQKKMEDAVRIFEMLGCNKSAEYYRKTPDS

SEQ ID NO: 4445 - DNA, 848 bp, Streptococcus pneumoniae
atggagcagattggaaaagtctttagacaattacgagagtcaagaaatatctcactgagacaagcaaccggaggacaattttcgccgtctatgttgtcccgttttgaaacaggtcagagtgagctttcggtggaaaagtttctatttgctctggaaaatatatctgccagtgtggaggagatcctctttctggcaagaggtttccagtatgatacagattctgagttgagaaaagaaattacagatgtcttggaaccaaagaatatagcacctcttgaggacttatatcgcagggagtataaaagcatgcccattctcacaacaaacagaaacatattctaaatgccattattatcaagtcttatatgaagagcatagatgaaagggtagacttaacagcagaggaaggaaaagtccttcatgattatttgttttctaccgagatctggggaatctatgaactcaatttattttcagtcagttctccatttttatctgtttctctttttactagatatgtacgagaaatggtacgtaaatctgattttctaatggaaatgtctggcaatcgaaacctttttcatactatactattgaatggctttttagctagtattgagtgtgaagaatttaccaatgcctattattttaaacgtgttatcgaagagcatttctacaaggaaaatgagacctatttccgaattgtttatctgtgggcagaaggtctccttgatagcaagcaaggtagagtcaaggaaggccagaaaaagatggaggatgctgtccgtatttttgagatgcttggctgtaataaatctgccgaatactatagaaaaactcccgattct

SEQ ID NO: 4446 - protein, 113 aa, Streptococcus pneumoniae
  transcriptional regulator, FRAMESHIFT
MEQIGKVFRQLRESRNISLRQATGGQFSPSMLSRFETGQSELSVEKFLFALENISASVEEILFLARGFQYDTDSELRKEITDVLEPKNIAPLEDLYRREYKSMPILTTNRNIF

SEQ ID NO: 4447 - DNA, 132 bp, Streptococcus pneumoniae
gtgataaatatcctctattttctcataattctgacaatttggcaagtttttgatgaattttctgaaaaatatgataaaatgaagaaaatacggaatcaaggggaagtctatggagcagattggaaaagtctt

SEQ ID NO: 4448 - protein, 44 aa, Streptococcus pneumoniae
  hypothetical protein; Cellular location: membrane
MINILYFLIILTIWQVFDEFSEKYDKMKKIRNQGEVYGADWKSL

SEQ ID NO: 4449 - DNA, 339 bp, Streptococcus pneumoniae
atgagagacgatatcaaaatcaatgaccgtgctttggccttgcaagaccaaattatcgaaaaactagagaaagtttttgatacagatgtggaattggatgtttacaatctaggtctgatttatgaaatcaatctggatgaaacggggctctgcaagattgtcatgaccttcaccgatactgcctgtgattgcgccgaaagcctgcctattgaaatcgtggcaggtctgaaacaaatcgagggtatcaaagatatcaaggttgaagttacctggtcgcctgcttggaaaatcacacgaatcagtcgctatggccgtattgcccttggactaccacctcgt

SEQ ID NO: 4450 - protein, 113 aa, Streptococcus pneumoniae
  conserved hypothetical protein; Cellular location: cytoplasm; Similar to strain R6 sequence 15903975 (2.E-61)
MRDDIKINDRALALQDQIIEKLEKVFDTDVELDVYNLGLIYEINLDETGLCKIVMTFTDTACDCAESLPIEIVAGLKQIEGIKDIKVEVTWSPAWKITRISRYGRIALGLPPR

SEQ ID NO: 4451 - DNA, 252 bp, Streptococcus pneumoniae
atgaaaatcaaagggcaaactagaaaactagccgcaggttgctcaaaacactgttttgaagttatggatagaactgacgaagtcagctcaaaacactgttttgaggttgtggatagaactgacgaagtcagctcaaaacactgttttgaggttgtggatagaactgacgaagtcagcccaaaacactgttttgaggttgtggatagaactgacgaagtcagtaaccatacctacggcaaggcgacgttgacg

SEQ ID NO: 4452 - protein, 84 aa, Streptococcus pneumoniae
  box element
MKIKGQTRKLAAGCSKHCFEVMDRTDEVSSKHCFEVVDRTDEVSSKHCFEVVDRTDEVSPKHCFEVVDRTDEVSNHTYGKATLT

SEQ ID NO: 4453 - DNA, 1701 bp, Streptococcus pneumoniae
atgactgaattagataaacgtcaccgcagtagcatttatgacagcatggttaaatcacctaaccgtgctatgcttcgtgcgactggtatgacagataaggactttgaaacatcgattgtgggagtgatttcgacttgggcggaaaatacaccatgtaacattcacttgcatgatttcgggaaactggctaaagaaggtgtcaaatctgcaggcgcttggcctgtacagtttggaaccattaccgtagcggacgggatcgctatgggaacgcctggtatgcgtttctctctaacatctcgtgacatcatcgcggactccatcgaggcggctatgagtggtcacaacgtggatgccttcgtcgctatcggtggctgtgacaagaacatgcctggatctatgattgctattgctaatatggatatcccagctattttcgcctatggtggaactattgcaccgggaaatcttgatggtaaagatatcgacttggtttctgtctttgaaggtatcggaaaatggaaccacggtgacatgacagctgaggacgtgaaacgtcttgaatgtaatgcctgccctggccctggtggttgtggtggtatgtatactgctaataccatggcaactgctatcgaagttctagggatgagtttgccagggtcatcctctcacccagctgaatcagctgataagaaagaagatatcgaagcagcaggacgtgctgttgttaagatgttggaacttggtctcaaaccatcagatatcttgactcgtgaagcctttgaagatgctatcactgtaacgatggctctcggtggttctacaaacgccactcttcacttgctcgccattgcccatgccgcaaatgttgacttgtcacttgaggacttcaatacgattcaagaacgtgtgcctcacttggccgacttgaaaccatctggtcagtatgtcttccaagacctctacgaagtcggtggtgtccctgcggttatgaagtatttgttggcaaatggtttccttcacggagatcgcatcacatgtactggtaagactgtagctgaaaacttggctgactttgcagacttgactccaggccaaaaagttatcatgccacttgaaaatccaaaacgtgcggatggtccgcttatcatcttgaacgggaaccttgctcctgacggtgcagttgccaaggtatcaggtgttaaagtgcgtcgtcacgttgggccagctaaggtctttgactcagaagaagatgcgattcaggccgttctgacagatgaaatcgttgatggcgatgtagtcgttgttcgttttgttggacctaaaggtggtcctggtatgcctgagatgctatcactttcttcaatgattgttggtaaaggtcagggagataaggtggccctcttgacggacggacgtttctctggtggtacttatggtctggttgttggacatatcgctcctgaagctcaggatggtggaccaattgcctatctccgtaccggcgatatcgttacggttgaccaagataccaaagaaatttctatggccgtatccgaagaagaacttgaaaaacgcaaggcagaaacaaccttgccaccactttacagccgtggtgtcctcggtaaatatgcccacatcgtatcatctgcttcacgcggagccgtgacagacttctggaatatggacaagtcaggtaaaaaa

SEQ ID NO: 4454 - protein, 567 aa, Streptococcus pneumoniae
  dihydroxy-acid dehydratase (ilvD); Cellular location: cytoplasm; Similar to strain R6 sequence 15903976 (0.E+01)
MTELDKRHRSSIYDSMVKSPNRAMLRATGMTDKDFETSIVGVISTWAENTPCNIHLHDFGKLAKEGVKSAGAWPVQFGTITVADGIAMGTPGMRFSLTSRDIIADSIEAAMSGHNVDAFVAIGGCDKNMPGSMIAIANMDIPAIFAYGGTIAPGNLDGKDIDLVSVFEGIGKWNHGDMTAEDVKRLECNACPGPGGCGGMYTANTMATAIEVLGMSLPGSSSHPAESADKKEDIEAAGRAVVKMLELGLKPSDILTREAFEDAITVTMALGGSTNATLHLLAIAHAANVDLSLEDFNTIQERVPHLADLKPSGQYVFQDLYEVGGVPAVMKYLLANGFLHGDRITCTGKTVAENLADFADLTPGQKVIMPLENPKRADGPLIILNGNLAPDGAVAKVSGVKVRRHVGPAKVFDSEEDAIQAVLTDEIVDGDVVVVRFVGPKGGPGMPEMLSLSSMIVGKGQGDKVALLTDGRFSGGTYGLVVGHIAPEAQDGGPIAYLRTGDIVTVDQDTKEISMAVSEEELEKRKAETTLPPLYSRGVLGKYAHIVSSASRGAVTDFWNMDKSGKK

SEQ ID NO: 4455 - DNA, 930 bp, Streptococcus pneumoniae
atgatgagaagtacgaaagaattacggcatgtatatagagacttccttttagaggctaatcaaagtgattctgatatagtagtcttagaagccgatttgtcaagttcgatggctactaataatcttgaaaaggactttggagaccgttatgtgaatgttgggattatggaagcagaaatggtcggccttgcagcaggcttgtctattcaggggtttagaccttatcttcatacatttggtccttttgcttcacgaagagtatttgatcaattatttatttctcttggatacgcacaattggatgccactgtgattggatcagatgcaggagtaacggcagagatgaatggtggaacacatatgccatttgaagaaattggattgttacgtttaattcctaaatcaatcattttcgaagcaactgatgatatccaatttcgtgaaatattgaaccagacattagacttaaaaggactaaaatatattcgaacaattagaaaagctccagttcctgtgtatcaaggtggagaagatttttctaaaggctacattgagttaaggcatggtgaagatcttgtaatcgttgcttctggcataatggttgctccaagtattcgagttgcagatgaactgtctaaattaggttattcagtaggtgtgatagatttatttagaatcaaaccgataccagaacagataaaaacaatgttaagtggaaaaactatatttactgtagaaaaccacaatcagataggtggaattggcagtgctttatgtgaattattctctgatgatggaataacaaaaattcatcggatgggtgttcaagaaagattcggtcaagtagggaaaatggattatcttcttaatgagtatggtttgagtgaatcgaatataaaagagaaggttctagaaatttataatgcaaga

SEQ ID NO: 4456 - protein, 310 aa, Streptococcus pneumoniae
  transketolase, C-terminal subunit; Cellular location: membrane; Similar to strain R6 sequence 15903977 (e-172)
MMRSTKELRHVYRDFLLEANQSDSDIVVLEADLSSSMATNNLEKDFGDRYVNVGIMEAEMVGLAAGLSIQGFRPYLHTFGPFASRRVFDQLFISLGYAQLDATVIGSDAGVTAEMNGGTHMPFEEIGLLRLIPKSIIFEATDDIQFREILNQTLDLKGLKYIRTIRKAPVPVYQGGEDFSKGYIELRHGEDLVIVASGIMVAPSIRVADELSKLGYSVGVIDLFRIKPIPEQIKTMLSGKTIFTVENHNQIGGIGSALCELFSDDGITKIHRMGVQERFGQVGKMDYLLNEYGLSESNIKEKVLEIYNAR

SEQ ID NO: 4457 - DNA, 855 bp, Streptococcus pneumoniae
atgattttaagtaaaaatagagaagatgggttaagaaaatttgcgactaacatccgattaaatactcttagaacattgaatcatcttggattcggacattacggaggaagtctgtctatcgtagaagttttagcggtgctttatggtgaaataatgccaatgactccagaaatatttgcagcacgagatagagattatttcatattatcaaaaggtcacggaggaccagctctatacagtacactctatttgaatggtttctttgacaaagaattcttatattctttaaatacaaatggaaccaaattaccgtctcatcctgatagaaatctaacgccaggcatagatatgacaacgggctctttaggacaaggaattagtgttgcaactggacttgcatatggtcagagaataagaaagagtcccttttatacttacgctattgttggagatggtgagttaaatgagggacaatgttgggaggctatacagtttgcttctcatcaacagttatccaacttaattgtatttgttgatgataacaaaaaacaattagatggttttacaaaggatatttgtaatccaggtgatttcgtagaaaaattttcagcatttggatttgaatccattagggtcaagggttcagatattagagaaatttatgaagggattgtccaattaaaacagtcaaataattcatcacctaagtgcattgtattagatactattaaaggtcaaggggttcaagagctggaagaaatgaaatccaatcatcatcttcgccctactgtagaggagaaacaaatgttaacttcagttgtagaaagattaagtcaggaattggaggaaacagaa

SEQ ID NO: 4458 - protein, 285 aa, Streptococcus pneumoniae
  transketolase, N-terminal subunit; Cellular location: membrane; Similar to strain R6 sequence 15903978 (e-165)
MILSKNREDGLRKFATNIRLNTLRTLNHLGFGHYGGSLSIVEVLAVLYGEIMPMTPEIFAARDRDYFILSKGHGGPALYSTLYLNGFFDKEFLYSLNTNGTKLPSHPDRNLTPGIDMTTGSLGQGISVATGLAYGQRIRKSPFYTYAIVGDGELNEGQCWEAIQFASHQQLSNLIVFVDDNKKQLDGFTKDICNPGDFVEKFSAFGFESIRVKGSDIREIYEGIVQLKQSNNSSPKCIVLDTIKGQGVQELEEMKSNHHLRPTVEEKQMLTSVVERLSQELEETE

SEQ ID NO: 4459 - DNA, 1344 bp, Streptococcus pneumoniae
atgatgaagttcatattggatattgttagtacaccagctattttagtagctttaattgcaatcttaggattagttcttcagaagaagaaattacctgatattattaaaggtggaattaagacctttgttggtttcttagttgtatctggtggtgcaggaattgtacaaaattctttaaatccatttggtaccatgtttgagcatgcttttcatttatctggcgttgtgccgaataatgaagcaattgtagctgtagctttaacaacatatggctcagctactgcaatgattatgtttgcaggcatggtgttcaatatcttaatcgctcgttttactcgatttaaatatatttttttaacagggcaccacactctatatatggcatgtatgattgcggtcattttatcagttgctggctttactagcttgcctctcatcttactaggaggattagcactcggtattattatgagtatttccccagcatttgtgcaaaaatatatggttcaattaactggaaatgacaaggtagctttaggtcatttcagttctttgggatattggttgagtggttttactggtagccttatcggtgacaaatcaaaatcaacagaggacattaaatttccaaagagtttagcttttttacgtgatagtactgttagtattactttatccatggcagttatttacattattgtagctatctttgcagggtcagaatatatagaaaaagaaatcagtagtggtacaagtggtctagtttatgctttacaattagcaggtcaatttgcagcaggggtatttgttattttagcaggtgttcgccttattttgggcgaaattgttccagcctttaaaggtatttcagagcgtcttgtacctaattcaaaacctgctttggattgtccgattgtttatacttatgcacccaatgcagttctaattggatttatctctagttttgttggtggtttagtaagtatggtaattatgattgcttcaggaacggttgttatcttaccaggtgttgtgcctcatttcttctgtggagcgactgcaggtgtcattgggaatgcatctggtggtgttcgtggagccactattggagcatttttacaaggtattttaatcagttttcttccagtctttttaatgccagttttgggaggacttggtttccaaggatcaactttctcagatgcagattttggtctatcaggaattattttaggaatgttaaatcaatttggctcacaagcaggcattgtgattggtcttgttcttattctagcagttatgtttggagtatcctttattaaaaagccatctgcaacggaggaa

SEQ ID NO: 4460 - protein, 448 aa, Streptococcus pneumoniae
  PTS system, IIC component, putative; Cellular location: membrane; Similar to strain R6 sequence 15903979 (0.E+01)
MMKFILDIVSTPAILVALIAILGLVLQKKKLPDIIKGGIKTFVGFLVVSGGAGIVQNSLNPFGTMFEHAFHLSGVVPNNEAIVAVALTTYGSATAMIMFAGMVFNILIARFTRFKYIFLTGHHTLYMACMIAVILSVAGFTSLPLILLGGLALGIIMSISPAFVQKYMVQLTGNDKVALGHFSSLGYWLSGFTGSLIGDKSKSTEDIKFPKSLAFLRDSTVSITLSMAVIYIIVAIFAGSEYIEKEISSGTSGLVYALQLAGQFAAGVFVILAGVRLILGEIVPAFKGISERLVPNSKPALDCPIVYTYAPNAVLIGFISSFVGGLVSMVIMIASGTVVILPGVVPHFFCGATAGVIGNASGGVRGATIGAFLQGILISFLPVFLMPVLGGLGFQGSTFSDADFGLSGIILGMLNQFGSQAGIVIGLVLILAVMFGVSFIKKPSATEE

SEQ ID NO: 4461 - DNA, 282 bp, Streptococcus pneumoniae
atgttaaaaattggtacagcttgtggttcaggattaggttcaagttttatggtacagatgaatattgaatctgtattgagtgatttgaatgtttcggatgtagaagttgaacattatgatttaggtggagcagatccaaatgcagctgatatttggattgttggtcgtgatctagctgattcagctagtcatcttggagatgttcgtatcttaaatagtattattgatatggatgaactacgagaattaattactaaactttgtgaagaaaaaggacttata

SEQ ID NO: 4462 - protein, 94 aa, Streptococcus pneumoniae
  PTS system, IIB component, putative; Cellular location: cytoplasm; Similar to strain R6 sequence 15903980 (1.E-49)
MLKIGTACGSGLGSSFMVQMNIESVLSDLNVSDVEVEHYDLGGADPNAADIWIVGRDLADSASHLGDVRILNSIIDMDELRELITKLCEEKGLI

SEQ ID NO: 4463 - DNA, 2028 bp, Streptococcus pneumoniae
atgtttgattatagagcactagttattttgatgactttgatggatcattgtgagctatcattatatgaattatctgttaaggtgagcttacctataaaggaagtcaaagaaggaatagattatttagtgccttatctagctaataaagggatagtgctggataaaaagcaaggtcgctatagtttatcaaatcgtacgaagcagtctttgacagatattattaagtcggatgaattggttttaccaaagtcgactcgcttagctttaatctatctttacactttttgccgattagattttatatcgaatagtcattaccaagactttttgaaagtaagtaagaatacaaccttatctgatattcaatcattaagaaagattatgttagataatgatttggagctagggtacagtagagcaaaaggttatactttacacggttcagagtggaataagcaccgcttagcttttcaaatggttagtgagttgctggaatcctccatagggatttggggtttggattatgttttatccagttgggggtattcattaacttatgatttgattgatcaggtagttaaagattattatgagaagctacagctagtacctattgttaatcaattaaaagtttaccttttcggtttagtattcattctgtgtaggtatcaaagggatgttgaaagagtatgtctttcagagacattagtatctcctgttattcaagatataaccactattttattggatacagtggttgatttgggaattatagatacggtgttttctgaggatgattatcgctatatcaccgttttattatcaagttgctttgaaggtgaagtagatgttgctccggtttactttaatcaattaacagaggctattataagtagaatggaagatatttctttgttacattttaaacaaagggaaggattgagagaaaatcttcgccgccaccttataccggcttactatagattaaagttcggcctacctagttcaaatgaatatgtattgcatgttaaagaacattatcctgatttatttgaattagtcaaagattctttgatgcccttgatggacgctattgacaatcccatacctgatagtgaaacagcatattttgttatccatttcggaggttatttaaagaaagcagatactttgcctcaaaaatggtataaagcagcaatcatttgtcctaatggtgttagttcttcattgatgttaaaagagaatctattagcattatttcctcaaattgagtttataggaacctcaaagattgatgatttacaggtgaaagctagtagtgactatgatatggttttttctaccataaaggtggagacagaaaagccaaattatctagtttcggttatgatgactgaagagcaagcaatacaactagtagaactagtgttaaaagattttccgaatttagagtatggagattttgagattgaacaaatcctgaatattgtcaaaagatatggaattattacacaagaattggaattaagattggcgttaaagaattatctttaccaaaaaaatgatagaaaggaaattgtaccagtgctagaacaacttattaccaaagaaacctatcaggttagttcgcaaaaattaggatggaaggaggcgattcgtttagcagctaaaccgcttttggatcaagataagataactgagaactaccctgaggcaatgattcaaaaagtagaagagtttggaccttttattaatttagggaagggagtagcaattcctcacgctcggccagatgaaggtgtgaatgaaataggaatgtcaatgttagttttggaagaaccgatttatttattggataatccagaacaagaggtaagattgttgatttgtattgcagccattgataatgagagtcatttaaaggctttgtcacatttaacaacaattttaagagataaaaatcatgttcaaactttaatatcatcaaaaaactatgatgacattaaaatgataattaaacaggaggat

SEQ ID NO: 4464 - protein, 676 aa, Streptococcus pneumoniae
  transcriptional regulator, BglG family; Cellular location: membrane; Similar to strain R6 sequence 15903981 (0.E+01)
MFDYRALVILMTLMDHCELSLYELSVKVSLPIKEVKEGIDYLVPYLANKGIVLDKKQGRYSLSNRTKQSLTDIIKSDELVLPKSTRLALIYLYTFCRLDFISNSHYQDFLKVSKNTTLSDIQSLRKIMLDNDLELGYSRAKGYTLHGSEWNKHRLAFQMVSELLESSIGIWGLDYVLSSWGYSLTYDLIDQVVKDYYEKLQLVPIVNQLKVYLFGLVFILCRYQRDVERVCLSETLVSPVIQDITTILLDTVVDLGIIDTVFSEDDYRYITVLLSSCFEGEVDVAPVYFNQLTEAIISRMEDISLLHFKQREGLRENLRRHLIPAYYRLKFGLPSSNEYVLHVKEHYPDLFELVKDSLMPLMDAIDNPIPDSETAYFVIHFGGYLKKADTLPQKWYKAAIICPNGVSSSLMLKENLLALFPQIEFIGTSKIDDLQVKASSDYDMVFSTIKVETEKPNYLVSVMMTEEQAIQLVELVLKDFPNLEYGDFEIEQILNIVKRYGIITQELELRLALKNYLYQKNDRKEIVPVLEQLITKETYQVSSQKLGWKEAIRLAAKPLLDQDKITENYPEAMIQKVEEFGPFINLGKGVAIPHARPDEGVNEIGMSMLVLEEPIYLLDNPEQEVRLLICIAAIDNESHLKALSHLTTILRDKNHVQTLISSKNYDDIKMIIKQED

SEQ ID NO: 4465 - DNA, 1005 bp, Streptococcus pneumoniae
atgactgaaaaactaatcaattcaaaaccaaatggtgtattcgcattgattctcattgagttgacaatcgtacttggtatctttatatttataatgggggttggttcggaaaacatttttggaattattatcggacctttactaatcgtaattgcaggtctagctcatgctggtttaaaagttgtcaaacctcaagaagctctggttctgacactctttggtaactatacaggtaccatcaaagaacctggcttttactttgtcaatcccttcagcgtagcagtcaaccctgcaaaccacactcgacttggacaaagtggtgatgttagcacaaaatctccttttttaggagctaaatcatcaaatgacaatgatgtaaatcttgaaattggcaagaaacagatttccctcaaagtcatgaccttgagcaattctcgtcaaaaaatcaatgattgcttaggaaaccctgtagaaatcggtatcgcggtaacttggagagttgtcgataccgctaaggcagtcttcaacgttgataactacaaagaatatctttcattgcaatgtgatagcgccctccgtaatattgtccgcatctatccttacgatgtgtctcctaatgtggatactacgggtgatgggcaagcagatgaaggtagtctccgtggctctagcgaaattgttgctaaccgtattcgtgaagaaatccaaagtcgtgttgaggatgctggcttggaaatccttgaagcacgtatcacttacctagcttatgctccagaaattgctgccgttatgcttcaacgccaacaagcatctgccattattgatgcacggaagatgattgtagatggtgctgtaggaatggttgaaatggcactagaacggctcaatgaaggggaattggtagaacttgacgaagaacgaaaagctgccatggtttcaaatctccttgtcgttctttgtggcaatcatgatgcacaaccaattgtcaacacaggaagcctttac

SEQ ID NO: 4466 - protein, 335 aa, Streptococcus pneumoniae
  conserved hypothetical protein; Cellular location: outside; Similar to strain R6 sequence 15903982 (0.E+01)
MTEKLINSKPNGVFALILIELTIVLGIFIFIMGVGSENIFGIIIGPLLIVIAGLAHAGLKVVKPQEALVLTLFGNYTGTIKEPGFYFVNPFSVAVNPANHTRLGQSGDVSTKSPFLGAKSSNDNDVNLEIGKKQISLKVMTLSNSRQKINDCLGNPVEIGIAVTWRVVDTAKAVFNVDNYKEYLSLQCDSALRNIVRIYPYDVSPNVDTTGDGQADEGSLRGSSEIVANRIREEIQSRVEDAGLEILEARITYLAYAPEIAAVMLQRQQASAIIDARKMIVDGAVGMVEMALERLNEGELVELDEERKAAMVSNLLVVLCGNHDAQPIVNTGSLY

SEQ ID NO: 4467 - DNA, 198 bp, Streptococcus pneumoniae
atggctgaagctaaaaaaaagcagatcccccttcgactctcaacaaagttatacgctgcactcgcatcatgggcagaagacgactttcgttcagtcaatgggcaaatcgaatatctcctcacagagtgtgtcaagcaacggaagaaagacggaaaatacgtatcagaaaccattgacgaaccatttgagattgatatt

SEQ ID NO: 4468 - protein, 66 aa, Streptococcus pneumoniae
  conserved domain protein; Cellular location: cytoplasm; Similar to strain R6 sequence 15903983 (7.E-34)
MAEAKKKQIPLRLSTKLYAALASWAEDDFRSVNGQIEYLLTECVKQRKKDGKYVSETIDEPFEIDI

SEQ ID NO: 4469 - DNA, 180 bp, Streptococcus pneumoniae
atggcagtacctgcacgtcgcacttcaaaagcgaagaaaaacaaacgtcgtacacactacaaagtaacagctccatctgtaaactttgacgaaactactggagattactcacgttctcaccgtgtatcacttaaaggatactacaaaggacgtaaaatcactaaagctgcatcagctgaa

SEQ ID NO: 4470 - protein, 60 aa, Streptococcus pneumoniae
  ribosomal protein L32 (rpmF); Cellular location: cytoplasm; Similar to strain R6 sequence 15903984 (5.E-30)
MAVPARRTSKAKKNKRRTHYKVTAPSVNFDETTGDYSRSHRVSLKGYYKGRKITKAASAE

SEQ ID NO: 4471 - DNA, 147 bp, Streptococcus pneumoniae
atgcgcgtaaatattacacttgaacacaaagaatctggtgaacgcttgtaccttacttctaaaaacaaacgtaacactccagaccgccttcaattgaagaaatactcaccaaaacttcgcaaacacgttgtgtttacagaggttaaa

SEQ ID NO: 4472 - protein, 49 aa, Streptococcus pneumoniae
  ribosomal protein L33 (rpmG); Cellular location: cytoplasm; Similar to strain R6 sequence 15903985 (4.E-24)
MRVNITLEHKESGERLYLTSKNKRNTPDRLQLKKYSPKLRKHVVFTEVK

SEQ ID NO: 4473 - DNA, 1863 bp, Streptococcus pneumoniae
atgaaaaaaactacaatattatcattaactacagctgcggttattttagcagcatatgtccctaatgaaccaatcctagcagatactcctagttcggaagtaatcaaagagactaaagttggaagtattattcaacaaaataatatcaaatataaggttctaactgtagaaggtaacataggaactgttcaagtgggtaatggagttactcctgtagagtttgaagctggtcaagatggaaaaccattcacgattcctacaaaaatcacagtaggtgataaagtatttaccgttactgaagtagctagtcaagcttttagttattatccagatgaaacaggtagaattgtctactatcctagctctattactatcccatcaagcataaaaaaaatacaaaaaaaaggcttccatggaagtaaagctaaaactattatttttgacaaaggcagtcagctggagaaaattgaagatagagcttttgatttttctgaattagaagagattgaattgcctgcatctctagaatatattggaacaagtgcattttcttttagtcaaaaattgaaaaagctaaccttttcctcaagttcaaaattagaattaatatcacatgaggcttttgctaatttatcaaatttagagaaactaacattaccaaaatcggttaaaacattaggaagtaatctatttagactcactactagcttaaaacatgttgatgttgaagaaggaaatgaatcgtttgcctcagttgatggtgttttgttttcaaaagataaaacccaattaatttattatccaagtcaaaaaaatgacgaaagttataaaacgcctaaggagacaaaagaacttgcatcatattcgtttaataaaaattcttacttgaaaaaactcgaattgaatgaaggtttagaaaaaatcggtacttttgcatttgcagatgcgattaaacttgaagaaattagcttaccaaatagtttagaaactattgaacgtttagccttttacggtaatttagaattaaaagaacttatattaccagataatgttaaaaattttggtaaacacgttatgaacggtttaccaaaattaaaaagtttaacaattggtaataatatcaactcattgccgtccttcttcctaagtggcgtcttagattcattaaaggaaattcatattaagaataaaagtacagagttttctgtgaaaaaagatacatttgcaattcctgaaactgttaagttctatgtaacatcagaacatataaaagatgttcttaaatcaaatttatctactagtaatgatatcattgttgaaaaagtagataatataaaacaagaaactgatgtagctaaacctaaaaagaattctaatcagggagtagttggttgggttaaagacaaaggtttatggtattacttaaacgaatcaggttcaatggctactggttgggttaaagacaaaggtttatggtattacttaaacgaatcaggttcaatggctactggttgggttaaagacaaaggcttatggtactacttaaatgaatcaggttcaatggctactggttgggttaaagacaaaggcttatggtattacttaaacgaatcaggttcaatggctactggttgggttaaagacaaaggcttatggtactacttaaatgaatcaggttcaatggctactggttgggttaaagacaaaggcttatggtattacttaaatgaatcaggttcaatggctactggttgggttacagtttctggtaaatggtactatacctataattcaggagatttattagtaaacacgactacacccgatggctatcgagtcaatgctaacggtgagtgggtagga

SEQ ID NO: 4474 - protein, 621 aa, Streptococcus pneumoniae
  choline binding protein PcpA (pcpA); Cellular location: outside; Feature of note: WYY motif; Similar to strain R6 sequence 15903986 (0.E+01)
MKKTTILSLTTAAVILAAYVPNEPILADTPSSEVIKETKVGSIIQQNNIKYKVLTVEGNIGTVQVGNGVTPVEFEAGQDGKPFTIPTKITVGDKVFTVTEVASQAFSYYPDETGRIVYYPSSITIPSSIKKIQKKGFHGSKAKTIIFDKGSQLEKIEDRAFDFSELEEIELPASLEYIGTSAFSFSQKLKKLTFSSSSKLELISHEAFANLSNLEKLTLPKSVKTLGSNLFRLTTSLKHVDVEEGNESFASVDGVLFSKDKTQLIYYPSQKNDESYKTPKETKELASYSFNKNSYLKKLELNEGLEKIGTFAFADAIKLEEISLPNSLETIERLAFYGNLELKELILPDNVKNFGKHVMNGLPKLKSLTIGNNINSLPSFFLSGVLDSLKEIHIKNKSTEFSVKKDTFAIPETVKFYVTSEHIKDVLKSNLSTSNDIIVEKVDNIKQETDVAKPKKNSNQGVVGWVKDKGLWYYLNESGSMATGWVKDKGLWYYLNESGSMATGWVKDKGLWYYLNESGSMATGWVKDKGLWYYLNESGSMATGWVKDKGLWYYLNESGSMATGWVKDKGLWYYLNESGSMATGWVTVSGKWYYTYNSGDLLVNTTTPDGYRVNANGEWVG

SEQ ID NO: 4475 - DNA, 180 bp, Streptococcus pneumoniae
atggacttaaaatttgaaggggttgatttagaatacaaaaaagctaaaaacaatcttccagagtctttctgggaaacctactcagcatttgcaaatacaaatggcgggaaaataattctcgggatagatgaaaaaaacattgacacctaccaaagagtcaatagactccctgcgaaatta

SEQ ID NO: 4476 - protein, 60 aa, Streptococcus pneumoniae
  hypothetical protein, fusion
MDLKFEGVDLEYKKAKNNLPESFWETYSAFANTNGGKIILGIDEKNIDTYQRVNRLPAKL

SEQ ID NO: 4477 - DNA, 348 bp, Streptococcus pneumoniae
aattatgaagcaagtaaacaattaactgatacacgatttaagcgtcttgttggtgttcagcgcacgacttttaaagagatgttagctgtattaaaaacagcttatcaacttaaacacgcaaaaggtggacgaaaacctaaattaagcctagaataccgcacttatgaagaaattgcggctgattttggtattcacgaaagcaacttaatccgtcggagccaatgggttgaagtaactcttgttcaaagtggtgttacgatttcaagaactcctcttagttctgaggacacggtaatgattgatgcgacggaagtaaaaatcaatcgccctaaaaaaagaattagcgaa

SEQ ID NO: 4478 - protein, 116 aa, Streptococcus pneumoniae
  IS1381, transposase OrfA, truncation FRAMESHIFT; Cellular location: cytoplasm; Similar to strain R6 sequence 15903987 (3.E-56)
NYEASKQLTDTRFKRLVGVQRTTFKEMLAVLKTAYQLKHAKGGRKPKLSLEYRTYEEIAADFGIHESNLIRRSQWVEVTLVQSGVTISRTPLSSEDTVMIDATEVKINRPKKRISE

SEQ ID NO: 4479 - DNA, 387 bp, Streptococcus pneumoniae
atgaaggctcaagcgattgtcacaagtcaagggagaattgtttctttggatatcactgtgaactattgtcatgatatgaagttgttcaaaatgagttgcagaaatatcggacaagctggtaaaatcttggctgacagtggttatcaagggctcatgaagatatgtcctcaagcacaaacttcacgtaaatccagcaaactcaagccactaacagctgaagataaagcctataaccatgcgctatctaaggagagaagcaaggttgagaacatctttgccaaagtaaaaacgtttaaaatgttttcaacaacctatcgaaatcatcgtaaacgcttcggattacgaatgaatttgattgctggtattatcaatcatgaactaggattc

SEQ ID NO: 4480 - protein, 129 aa, Streptococcus pneumoniae
  IS1381, transposase OrfB FRAMESHIFT; Cellular location: cytoplasm; Similar to strain R6 sequence 15903038 (2.E-67)
MKAQAIVTSQGRIVSLDITVNYCHDMKLFKMSCRNIGQAGKILADSGYQGLMKICPQAQTSRKSSKLKPLTAEDKAYNHALSKERSKVENIFAKVKTFKMFSTTYRNHRKRFGLRMNLIAGIINHELGF

SEQ ID NO: 4481 - DNA, 324 bp, Streptococcus pneumoniae
gtgattttatggagttttgattttgcaaatgatcatgctcacgcatttttcatggataatgttgagtggagtcatgcagattcttactttcgtagctttgttagtgacgatgttgaagaacgttacacagaaaatgtctatctggatagcctaagtgtcaaacaaaaatttaagtttattttcgacttcggtgatgaatggcgttttgaatgccaagtgctgagagaaatcgagacagaggacgaagaagcttatctcgtacgttcggttggaacgtcgccagaacaatatccagattatgatggttttgactatgaagaatgg

SEQ ID NO: 4482 - protein, 108 aa, Streptococcus pneumoniae
  hypothetical protein; Cellular location: cytoplasm; Similar to strain R6 sequence 15903989 (8.E-63)
MILWSFDFANDHAHAFFMDNVEWSHADSYFRSFVSDDVEERYTENVYLDSLSVKQKFKFIFDFGDEWRFECQVLREIETEDEEAYLVRSVGTSPEQYPDYDGFDYEEW

SEQ ID NO: 4483 - DNA, 207 bp, Streptococcus pneumoniae
gtgaaacagaagaattatctggtttcaaatgctacagttagacaaacttatgataaaatagcagaaagtgaatgtttcctaagagcaattggaggtattatgctacacttaaaattagtaaaacaagaaatagaagctgaaaagccagcatctgtagaagcttggatcatttccgtcaaatttaaaaaaggttgctaccgacatata

SEQ ID NO: 4484 - protein, 69 aa, Streptococcus pneumoniae
  hypothetical protein; Cellular location: cytoplasm
MKQKNYLVSNATVRQTYDKIAESECFLRAIGGIMLHLKLVKQEIEAEKPASVEAWIISVKFKKGCYRHI

SEQ ID NO: 4485 - DNA, 93 bp, Streptococcus pneumoniae
ttgaaaccagataattcttctgtttcacgcgaaacaccctgcgccaagcaaggtgttcttgtttttatactcaatgaaaatcaaagagcaaac

SEQ ID NO: 4486 - protein, 31 aa, Streptococcus pneumoniae
  box element
MKPDNSSVSRETPCAKQGVLVFILNENQRAN

SEQ ID NO: 4487 - DNA, 1878 bp, Streptococcus pneumoniae
atggtaagatttacaggacttagtctcaaacaaacgcaagctattgaggttttaaaaggtcacatttctctaccagatgtggaagtggctgtcactcagtctgaccaagcatctatctctatcgagggtgaggaaggtcactatcaattgacctaccgcaaacctcaccaactttatcgtgccttgtccttgttggtaacagttctagcagaagctgataaagtagagattgaggaacaagcagcttacgaagatttggcttacatggttgactgttctcgaaatgcggtgctgaatgtggcttctgccaagcagatgattgagatattggctctcatgggctactcaacctttgagctttacatggaagacacttaccagattgaagggcagccttactttggctatttccgtggagcttattcagcagaggagttgcaggaaatcgaagcctatgcccaacagtttgacgtgacctttgtaccatgcatccagaccttggcccacttgtcggcctttgtcaaatggggtgtcaaggaagtgcaggagctccgtgatgtagaggacattcttctcattggcgaagaaaaggtttatgacttgattgatggcatgtttgccacgttgtctaaactgaagactcgcaaggtcaatatcgggatggacgaagcccacttggttggtttgggacgctacctgattctgaacggtgttgtggatcgtagtctcctcatgtgccaacacttggagcgcgtgctggatattgctgacaaatatggtttccactgccagatgtggagtgatatgttcttcaaactcatgtcagcggatggccagtacgaccgtgatgtggaaattccagaggaaactcgtgtctacctagaccgtctcaaagaccgtgtgactctggtttactgggattattatcaggatagcgaggaaaaatacaaccgtaatttccgcaatcatcacaagattagccatgaccttgcatttgcagggggagcttggaagtggattggctttacacctcacaaccattttagccgtctagtggctatcgaggctaataaagcctgccgtgccaatcagattaaagaagtcatcgtaacgggttggggagacaatggtggtgaaactgcccagttctctatcctaccaagcttgcaaatctgggcagaactcagctatcgcaatgacctagatggtttgtctgcgcacttcaagaccaatactggtctaacggttgaggattttatgcagattgaccttgccaacctcttaccagacctaccaggcaatctcagcggtatcaatcccaaccgctatgttttttatcaggatattctttgtccgattcttgatcaacacatgacacctgaacaggacaaaccgcacttcgctcaggctgctgagacgcttgctaacattaaagaaaaagctggaaactatgcctatctctttgaaactcaggcccagttgaatgctattttaagtagcaaagtagatgtgggacgacgcattcgtcaggcctaccaagcggatgataaagaaagtttacaacaaatcgccagacaagaattaccagaacttagaagccaaattgaagacttccatgccctctttagccaccaatggctgaaagaaaacaaggtctttggtttggatacagttgacatccgtatgggcggactcttgcaacgcatcaaacgagcagaaagccgtatcgaggtttatctggctggtcagcttgaccgcatcgacgagctggaagttgaaatcctaccatttactgacttctacgcagacaaggatttcgcagcaactacagccaaccagtggcataccattgcgacagcgtcgacgatttatacgact

SEQ ID NO: 4488 - protein, 626 aa, Streptococcus pneumoniae
  glycosyl hydrolase-related protein; Cellular location: cytoplasm; Similar to strain R6 sequence 15903990 (0.E+01)
MVRFTGLSLKQTQAIEVLKGHISLPDVEVAVTQSDQASISIEGEEGHYQLTYRKPHQLYRALSLLVTVLAEADKVEIEEQAAYEDLAYMVDCSRNAVLNVASAKQMIEILALMGYSTFELYMEDTYQIEGQPYFGYFRGAYSAEELQEIEAYAQQFDVTFVPCIQTLAHLSAFVKWGVKEVQELRDVEDILLIGEEKVYDLIDGMFATLSKLKTRKVNIGMDEAHLVGLGRYLILNGVVDRSLLMCQHLERVLDIADKYGFHCQMWSDMFFKLMSADGQYDRDVEIPEETRVYLDRLKDRVTLVYWDYYQDSEEKYNRNFRNHHKISHDLAFAGGAWKWIGFTPHNHFSRLVAIEANKACRANQIKEVIVTGWGDNGGETAQFSILPSLQIWAELSYRNDLDGLSAHFKTNTGLTVEDFMQIDLANLLPDLPGNLSGINPNRYVFYQDILCPILDQHMTPEQDKPHFAQAAETLANIKEKAGNYAYLFETQAQLNAILSSKVDVGRRIRQAYQADDKESLQQIARQELPELRSQIEDFHALFSHQWLKENKVFGLDTVDIRMGGLLQRIKRAESRIEVYLAGQLDRIDELEVEILPFTDFYADKDFAATTANQWHTIATASTIYTT

SEQ ID NO: 4489 - DNA, 867 bp, Streptococcus pneumoniae
atgaccattgcaacgattgatatcggagggactgggattaagtttgccagtctgactcctgatgggaaaatactggataagacaagtatttcaacgcctgaaaacttggaggatttactagcgtggctagatcaacgcttgtcagaacaggattacagtgggattgctatgagcgttccaggtgcagtcaatcaagagacaggtgtgattgatggcttcagtgcggtgccctacatccatggcttttcttggtatgaggcgcttagctcttatcagctacctgtccatttagaaaatgatgccaactgcgttggactcagtgaactactagctcatccagagcttgaaaatgcagcctgtgtcgtgattgggacagggattggcggagccatgattatcaatggtagacttcatcgaggtcgccacggtctgggtggagaatttggctacatgacaacccttgcccctgctgaaaaacttaataactggtcgcaactagcatcaactgggaatatggtacgatacgtgattgaaaaatctggtcatactgattgggacggtcgcaagatttaccaagaggccgcagctggtaatatcctttgtcaagaagccattgagcgcatgaaccgcaatctggcgcaaggcttgctcaatatccagtatctgatcgatccaggtgtcatcagtctgggtggctctatcagtcaaaatccagattttatccaaggtgtcaagaaggctgttgaagactttgtcgatgcctacgaagaatacacggtcgcaccagttatccaggcctgcacctatcacgcagatgccaatctctacggtgctcttgtcaactggctacaggaggaaaagcaatgg

SEQ ID NO: 4490 - protein, 289 aa, Streptococcus pneumoniae
  ROK family protein; Cellular location: membrane; Similar to strain R6 sequence 15903991 (e-167)
MTIATIDIGGTGIKFASLTPDGKILDKTSISTPENLEDLLAWLDQRLSEQDYSGIAMSVPGAVNQETGVIDGFSAVPYIHGFSWYEALSSYQLPVHLENDANCVGLSELLAHPELENAACVVIGTGIGGAMIINGRLHRGRHGLGGEFGYMTTLAPAEKLNNWSQLASTGNMVRYVIEKSGHTDWDGRKIYQEAAAGNILCQEAIERMNRNLAQGLLNIQYLIDPGVISLGGSISQNPDFIQGVKKAVEDFVDAYEEYTVAPVIQACTYHADANLYGALVNWLQEEKQW

SEQ ID NO: 4491 - DNA, 2658 bp, Streptococcus pneumoniae
atgaggttttacttcatggaaaatgttgttgtacatattatctcacatagtcactgggatcgtgagtggtacttgccttttgaaagccatcgtatgcagttggtggaattgtttgacaatctctttgatctctttgaaaatgaccctgagttcaagagtttccacttggatggacaaactattgtccttgatgactacttacaaattcgccctgaaaatcgcgacaaggtccaacgctacattgacgagggcaaacttaaaattggtcccttttacatcttgcaggatgactacttgatctccagtgaagccaatgtccgcaataccttgattggtcaacaagaagctgccaaatggggtaaatcaacccagattggctactttccagatacctttggaaatatgggacaagcgcctcaaattcttcaaaaatcaggcattcacgtggcggcctttggtcgtggtgtgaagccgattggatttgacaaccaagtccttgaagatgagcagtttacgtctcagttttcagaaatgtactggcagggtgtggatggtagtcgtgttttaggtattctctttgccaactggtacagtaacgggaatgaaattccagttgacaaagatgaggccttgaccttctggaaacaaaaattgtcagatgtgcgtgcctacgcttcgaccaaccaatggttgatgatgaacggctgtgaccaccagcctgtacagaaaaatctgagcgaagccattcgtgtggcaaatgaactcttcccggatgtaatctttgttcatagttcttttgatgaatatgttcaagctgtagaaggtgcgcttcctgaacacttatcaactgttacaggcgagttgaccagtcaggaaacagatggctggtacacacttgccaacacttcttcatcccgcatttacctaaaacaagccttccaagaaaatagcaacctcctagagcaagtggtagaacccttgactattatcactggtggacacaaccacaaggaccagttgacctatgcttggaaaacacttttgcagaatgcgccacatgatagtatctgtggctgtagcgtggacgaagttcaccgcgagatggaaacgcgttttgccaaggtcaaccaagtaggaaactttgttaaaagtaacttgctcaacgagtggaagggtaaaattgctacggataaggctcaaagtgactatctctttactgtcattaacacaggcttgcatgataaggtcgatactgtcagcacagtgattgatgtggcgacttgtgatttcaaggaattgcacccaacagaaggctacaaaaagatggctgctcttatcttgccaagttaccgtgtggaggacttggatggtcgtcctgtagaggctacaatcgaagacctcggagctaattttgagtataatttaccaaaagacaagttccgccaagctcgtattgctcgtcaagtgcgcgtgaccattccagttcacctagcgccgctttcttggacaaccttccaattgctggaaggaaaacaagaacaccgtgagggtatttaccaaaacggagtgattgatacaccattcgtaacggtgagtgtggatgacaacatcacagtctatgacaagacaactcacgaagcctatgaagactttatccgctttgaagaccgtggggacatcggaaacgagtatatctatttccaaccaaaaggaacagagccaatctttgcagagcttaagggccacgaggtcttggaaaacacagcttgctatgctaaaatcttgctcaaacatgaattgaccgtgcctgtcagtgcggatgaaaagctagaagaagagcaacaaggtatcatcgagtttatgaagcgtgaggctggacggtcagaagaattgacaaacattcctctggaaactgagttgactgtcttcgttgacaatccacaaatccgcttcaagactcgctttactaacactgccaaggatcaccgtatccgtctcttggtcaagactcataacacgcgtccaagcaatgattctgaaagtatctatgaggtggtgacacgaccaaacaaaccagctgcttcatgggaaaaccctgaaaatcctcaacaccaacaagcttttgtcagtctgtatgacgatgaaaaaggggtgactgtatccaacaagggattgaatgaatacgaaatccttggggataacaccattgccgtgaccattttgcgtgcatcaggtgagctaggtgactggggctacttcccaacgccagaagcacaatgcttgcgggagtttgaagtcgagtttgcacttgaatgccaccaagcccaagaacgcttctcagcctatcgtcgtgccaaagccttgcagacaccgtttaccagccttcagcttgctagacaggaaggaagcgtggttgcgactggtagcctcttgagccattctgttctcagcataccgcaagtttgtccaacagcctttaaggtagctgaaaatgaagaaggctatgtgcttcgttactacaatatgtgtagtgaaaatgtacgtgtgccagaaagtcaacatctcttccttgacctacttgaacgaccatacccagttcattcaggactattggctccacaagagattcgtacagaattcatcaaaaaagaagaaatt

SEQ ID NO: 4492 - protein, 886 aa, Streptococcus pneumoniae
  conserved hypothetical protein; Cellular location: cytoplasm; Feature of note: RGD motif; Similar to strain R6 sequence 15903992 (0.E+01)
MRFYFMENVVVHIISHSHWDREWYLPFESHRMQLVELFDNLFDLFENDPEFKSFHLDGQTIVLDDYLQIRPENRDKVQRYIDEGKLKIGPFYILQDDYLISSEANVRNTLIGQQEAAKWGKSTQIGYFPDTFGNMGQAPQILQKSGIHVAAFGRGVKPIGFDNQVLEDEQFTSQFSEMYWQGVDGSRVLGILFANWYSNGNEIPVDKDEALTFWKQKLSDVRAYASTNQWLMMNGCDHQPVQKNLSEAIRVANELFPDVIFVHSSFDEYVQAVEGALPEHLSTVTGELTSQETDGWYTLANTSSSRIYLKQAFQENSNLLEQVVEPLTIITGGHNHKDQLTYAWKTLLQNAPHDSICGCSVDEVHREMETRFAKVNQVGNFVKSNLLNEWKGKIATDKAQSDYLFTVINTGLHDKVDTVSTVIDVATCDFKELHPTEGYKKMAALILPSYRVEDLDGRPVEATIEDLGANFEYNLPKDKFRQARIARQVRVTIPVHLAPLSWTTFQLLEGKQEHREGIYQNGVIDTPFVTVSVDDNITVYDKTTHEAYEDFIRFEDRGDIGNEYIYFQPKGTEPIFAELKGHEVLENTACYAKILLKHELTVPVSADEKLEEEQQGIIEFMKREAGRSEELTNIPLETELTVFVDNPQIRFKTRFTNTAKDHRIRLLVKTHNTRPSNDSESIYEVVTRPNKPAASWENPENPQHQQAFVSLYDDEKGVTVSNKGLNEYEILGDNTIAVTILRASGELGDWGYFPTPEAQCLREFEVEFALECHQAQERFSAYRRAKALQTPFTSLQLARQEGSVVATGSLLSHSVLSIPQVCPTAFKVAENEEGYVLRYYNMCSENVRVPESQHLFLDLLERPYPVHSGLLAPQEIRTEFIKKEEI

SEQ ID NO: 4493 - DNA, 1344 bp, Streptococcus pneumoniae
atgtattttctgtctcaaaagctatatactgaacatgaaacttgtttgaaagaggtaaaatttaaaatggtttattcgaaagaaattgtcagagagtggctagatgaagtagcagagcgggctaaggactatccagagtgggtggatgttttcgagcgttgctacaccgataccttggacaatacggttgaaatcttagaagatggttcaacttttgtcttgactggggatattcctgccatgtggcttcgagattcgacagcccaactcagaccctaccttcatgtagctaaaagagatgccctcctgcgtcagaccattgcaggtttggtcaaacgtcagatgaccttggtactcaaggatccctatgctaactccttcaacattgaggagaactggaaagggcaccacgagactgaccacacagaccttaacggctggatctgggagcgcaagtatgaggtggattcgctttgctatcctttgcagttggcttatctcctctggaaagagactggcgagactagtcagtttgatgagatttttgtcgcagcgactaaggaaattctccatctgtggacggtggaacaagaccacaagaactctccttatcgttttgtccgagatacggaccgtaaggaagacaccttggtaaatgatggctttggacctgactttgcagtgacaggtatgacttggtcagcttttcgtccgagtgatgactgttgccagtatagttacttgattccgtcaaatatgtttgctgtagtagtcttgggttatgtgcaagaaatcttcgcagcattaaacctagctgatagccagagtgttattgctgatgccaagcgtcttcaggatgaaatccaagaaggaatcaaaaactacgcttacaccaccaacagcaagggcgaaaagatttacgcttttgaagtggatggcctaggaaatgccagcatcatggatgatccaaatgtaccaagtctactagctgcgccctatctgggctactgttcggtcgatgatgaagtgtatcaagctactcgtcgtaccattttgagctctgaaaatccatacttctaccaaggagaatacgcaagcggtctcggcagttctcataccttctatcgctatatctggccaatcgccctttctatccaaggcttgacaacaagagataaggcagagaaaaaattcttgctggatcagctggttgcctgcgatggtggtacaggtgtcatgcacgaaagctttcatgtagatgatccgaccctctactctcgtgaatggttctcctgggctaacatgatgttctgtgagttggtcttggattacttggatattcgc

SEQ ID NO: 4494 - protein, 448 aa, Streptococcus pneumoniae
  conserved hypothetical protein; Cellular location: membrane; Similar to strain R6 sequence 15903993 (0.E+01)
MYFLSQKLYTEHETCLKEVKFKMVYSKEIVREWLDEVAERAKDYPEWVDVFERCYTDTLDNTVEILEDGSTFVLTGDIPAMWLRDSTAQLRPYLHVAKRDALLRQTIAGLVKRQMTLVLKDPYANSFNIEENWKGHHETDHTDLNGWIWERKYEVDSLCYPLQLAYLLWKETGETSQFDEIFVAATKEILHLWTVEQDHKNSPYRFVRDTDRKEDTLVNDGFGPDFAVTGMTWSAFRPSDDCCQYSYLIPSNMFAVVVLGYVQEIFAALNLADSQSVIADAKRLQDEIQEGIKNYAYTTNSKGEKIYAFEVDGLGNASIMDDPNVPSLLAAPYLGYCSVDDEVYQATRRTILSSENPYFYQGEYASGLGSSHTFYRYIWPIALSIQGLTTRDKAEKKFLLDQLVACDGGTGVMHESFHVDDPTLYSREWFSWANMMFCELVLDYLDIR

SEQ ID NO: 4495 - DNA, 2082 bp, Streptococcus pneumoniae
atgaaaccactacttgaaaccatcgatacccgctttggaactaccaacaagcatgccttttctcggggaaataccctgccatacacaggcgtgccttttgggatgaattactttgtgccccagaccagtgaccaggatggatcttggttttttgatccacatctgcctatctttcaggggattcgattaactcaccagcccagtccttggattggggactactcttggctccttctgacacctgtcaccagtcaactggggggagacagcctctttcaccgccagtcttcttatgatatagataaagcttgcttccagcctcactatttgaagctcttttctctgcgttatcagattgaaacccagctcacaccgacttgctatggtgcttctattcgtttgaatcaaaagcaaggcaaagccctctccctctatcttcacgcagcagatgaactgacagtagagcaagtagataagcggactcttgccctgcgacaagaaggtaaaactgaaactaacaaaaattcgctaacgatgttcactgccctgcaaatgaacacggatattcttgctatcagccaagaagctggagactggcgaattgacttagcaagtagtcaaaccgagatgcaactagccacttctttcatctctccttctcaagctctaatcaatctacctcaagaagattttgatagctgtaaatcaagtgcccaagtggattgggaaaatctcctccatcgttttgacattatagagacaggagaggctgaccgaaccttctttgaccactgcctctacagactcttcctcttcccacagactttttatgagattaatgaatcagggcaagccatccacatggatctggctactggtactgtcaagcctggtgtcctctttagcaacaatggtttctgggataccttccgcaccaccttccccctctttgcccttatcataccggagcactatcaacgctttttagaaggtttcctcaatagctaccgcgatactggtttccttccaaaatggctggctccagatgaacggggtatgatgccaggtacacttttagacggtattatcgcagatagcgcctgcaaggacatgacccccgacctagaaggagaactcttccaagccatgctcgaaacagccagcaaagccgaccctctcggcatcaatggccgccacggactagcccaataccaagaactaggttacctctctaccgaccaccacgaaagtgttagccatactctagactatgcctatagtgacttttgtatcgccagctgtgccaaaaaactagagaacatagaaatcgctgaaacctacaaggctgcttcacaaaattaccgccagctatttgacgctgagacaggttacatgcgagcacgagacaatcaaggaaactttcaccctgacttctctccttatagttgggggcgagactacgctgaatgctctgccattcaagctactttaggcgttctccacgacatccctggcttaatccaactgatgggtggaaaagaaacctttagcaactatcttttgaaagcctgtcaagatgctcccctctttgaaacaacaggctatggttacgaaattcacgaaatgagcgagatggctactgctccttttggacaaatagccatttccaaccagcctagtttccacattccttatctcttccgttacagcgattaccctgactacactgcccttcttatcaagacgctccgtcagaaagcttttcacccaagttgggaagcctatcctggagatgaagacaatggtagtctctctgcttggtacatctggtcagctctcggattttatccaacctgtccaggaaaaccaagctatgacctcggaatccctctctttgaccatctacgagtctacctcgctaaagaagataaatggctggatatccatactaaacaaaaccacaaccattttaactttgtcaaagaatgccgactggacaaaacactcgtatcaactattcaacaccaagacctcttaaaagctgaacaactaactttcaccctcagctggttaccaagtcac

SEQ ID NO: 4496 - protein, 694 aa, Streptococcus pneumoniae
  antigen, cell wall surface anchor family; Cellular location: cytoplasm; Feature of note: antigen; Similar to strain R6 sequence 15903994 (0.E+01)
MKPLLETIDTRFGTTNKHAFSRGNTLPYTGVPFGMNYFVPQTSDQDGSWFFDPHLPIFQGIRLTHQPSPWIGDYSWLLLTPVTSQLGGDSLFHRQSSYDIDKACFQPHYLKLFSLRYQIETQLTPTCYGASIRLNQKQGKALSLYLHAADELTVEQVDKRTLALRQEGKTETNKNSLTMFTALQMNTDILAISQEAGDWRIDLASSQTEMQLATSFISPSQALINLPQEDFDSCKSSAQVDWENLLHRFDIIETGEADRTFFDHCLYRLFLFPQTFYEINESGQAIHMDLATGTVKPGVLFSNNGFWDTFRTTFPLFALIIPEHYQRFLEGFLNSYRDTGFLPKWLAPDERGMMPGTLLDGIIADSACKDMTPDLEGELFQAMLETASKADPLGINGRHGLAQYQELGYLSTDHHESVSHTLDYAYSDFCIASCAKKLENIEIAETYKAASQNYRQLFDAETGYMRARDNQGNFHPDFSPYSWGRDYAECSAIQATLGVLHDIPGLIQLMGGKETFSNYLLKACQDAPLFETTGYGYEIHEMSEMATAPFGQIAISNQPSFHIPYLFRYSDYPDYTALLIKTLRQKAFHPSWEAYPGDEDNGSLSAWYIWSALGFYPTCPGKPSYDLGIPLFDHLRVYLAKEDKWLDIHTKQNHNHFNFVKECRLDKTLVSTIQHQDLLKAEQLTFTLSWLPSH

SEQ ID NO: 4497 - DNA, 1677 bp, Streptococcus pneumoniae
atgaagaaaatcaaaccgcatggaccgttaccaagtcagactcagctagcttatctgggagatgaactagcagcttttatccacttcggtcctaataccttttatgaccaagaatgggggactggacaggaggatcctgagcgctttaacccgagtcagttggatgcgcgtgagtgggttcgtgtgctcaaggaaacgggcttcaaaaagttgattttggtggtcaagcaccacgatggctttgtcctttatccgacagctcacacagattattcggttaaggtcagtccttggaggagaggaaagggcgacttgctccttgaagtatcccaagctgccacagagtttgatatggatatgggggtctacctgtcaccgtgggatgcccatagtcccctctatcatgtggaccgagaagcggactacaatgcctattatctggctcagttgaaggaaatcttatcaaatcctaactatgggaatgctggtaagttcgctgaggtttggatggatggtgccagaggagagggcgcgcaaaaggttaattatgaatttgaaaaatggtttgaaaccattcgtgacctgcagggcgattgcttgattttttcaacagaaggcaccagtatccgctggattggcaatgaacgagggtatgcaggtgatccactgtggcaaaaggtgaatcctgataaactaggaacagaagcagagctgaactatcttcagcacggggatccctcgggcacgattttttcaatcggagaggcagatgtttccatccgtccaggctggttctaccatgaggatcaggatcctaagtctctcgaggagttggtcgaaatctactttcactcagtagggcgaggaactccactcttgcttaatattccgccgaatcaagctgggctctttgatgcaaaggatattgaacgactttatgaatttgcgacctatcgcaatgagctctataaagaagatttggctctgggagctgaggtatctggtccagctctttccgcagactttgcttgtcgccatttgacagacggccttgagaccagctcttgggcaagcgatgcagacttgcccatccagttagaactcgacttaggttctcctaaaacttttgatgtaattgagttaagagaagatttgaagctagggcaacgaatcgctgcttttcatgtgcaagtagaggtggatggtgtctggcaggagtttggttcgggtcatactgttggttacaaacgtctcttacgaggagcagttgttgaggcacagaagatacgtgtagtcattacagaatcacaggctttgcctttgttgaccaagatttccctttataaaactcctggattatcaaaaaaagaagttgttcaggaactagcatttgcagaaaaaagcctagctgtggcaaagggagaaaatgcctattttacagttaagcgcagagaatgtagtggtcctttagaagctaagatttcgattcaaccggggacaggtgtccatggtgtcgcctatcaggatgagattcaagtccttgcgtttcaaactggtgagactgaaaaaagtctgacgctaccaaccttgtatttcgcaggagataaaaccttggatttctatctgaacctaacggtggatggtcagcttgtggatcaacttcaagtccaagtttca

SEQ ID NO: 4498 - protein, 559 aa, Streptococcus pneumoniae
  conserved hypothetical protein; Cellular location: outside; Similar to strain R6 sequence 15903995 (0.E+01)
MKKIKPHGPLPSQTQLAYLGDELAAFIHFGPNTFYDQEWGTGQEDPERFNPSQLDAREWVRVLKETGFKKLILVVKHHDGFVLYPTAHTDYSVKVSPWRRGKGDLLLEVSQAATEFDMDMGVYLSPWDAHSPLYHVDREADYNAYYLAQLKEILSNPNYGNAGKFAEVWMDGARGEGAQKVNYEFEKWFETIRDLQGDCLIFSTEGTSIRWIGNERGYAGDPLWQKVNPDKLGTEAELNYLQHGDPSGTIFSIGEADVSIRPGWFYHEDQDPKSLEELVEIYFHSVGRGTPLLLNIPPNQAGLFDAKDIERLYEFATYRNELYKEDLALGAEVSGPALSADFACRHLTDGLETSSWASDADLPIQLELDLGSPKTFDVIELREDLKLGQRIAAFHVQVEVDGVWQEFGSGHTVGYKRLLRGAVVEAQKIRVVITESQALPLLTKISLYKTPGLSKKEVVQELAFAEKSLAVAKGENAYFTVKRRECSGPLEAKISIQPGTGVHGVAYQDEIQVLAFQTGETEKSLTLPTLYFAGDKTLDFYLNLTVDGQLVDQLQVQVS

SEQ ID NO: 4499 - DNA, 222 bp, Streptococcus pneumoniae
atgcttctccaaaatctatcttcaaaagaatgttgcatctttttatcctttcacacaaacatttctctttatacagatccaagtgataaccagatgataattggacactttttgatcatttgtatattttttgaaaaattttttaaaaaaattttatatcctttttatagaagtttatgcatttgtatctatgtattctatcctatgttatgtataataaca

SEQ ID NO: 4500 - protein, 74 aa, Streptococcus pneumoniae
  hypothetical protein; Cellular location: membrane
MLLQNLSSKECCIFLSFHTNISLYTDPSDNQMIIGHFLIICIFFEKFFKKILYPFYRSLCICIYVFYPMLCIIT

SEQ ID NO: 4501 - DNA, 1227 bp, Streptococcus pneumoniae
atgtcttcacatccaattcaggtcttctcagaaattgggaaactgaaaaaagttatgttgcaccgtccaggcaaggagttagaaaacttgttgccggactatcttgaaaggcttctttttgatgatattcctttcttggaagatgctcaaaaagaacatgatgcatttgcccaagctcttcgcgatgaaggaattgaggttctctacctagaacaactcgctgctgaatcattgacctctccagaaatccgcgatcaatttatcgaggaatacttagacgaagccaacatccgtgatcgtcaaaccaaggttgctattcgtgaattgcttcacggcatcaaggacaaccaagaattggttgaaaaaacaatggctgggattcaaaaagttgaattgccagaaattcctgacgaagctaaagatctaactgacttagttgaatcagagtatccatttgcaattgacccgatgccaaacctctatttcactcgcgacccatttgcaacaattggaaacgccgtatcgcttaaccacatgtttgcagacactcgtaaccgtgaaacactctacggtaagtatatcttcaaataccacccaatctatggcggaaaagtggatttggtctacaaccgtgaagaagatacgcgtatcgaaggtggagacgagttagttctttctaaagacgtccttgcagtaggtatctctcaacgtacagacgcagcttctatcgaaaaacttttggtcaacatcttcaagaaaaatgttggcttcaagaaagttttggcctttgaatttgctaacaaccgtaaattcatgcacttggatactgtcttcactatggtagactatgacaagttcactattcacccagaaatcgaaggcgaccttcacgtttactcagttacttacgaaaacgaaaaacttaaaatcgttgaagagaaaggtgacttagctgaacttcttgctcaaaaccttggtgtagaaaaagttcatttgattcgttgcggtggtggcaatatcgtagcagctgcgcgtgaacaatggaacgacggttctaacactttgaccatcgcacctggtgtggtagttgtttatgaccgcaataccgtgaccaataagattttggaagaatacgggcttcgcttgattaagattcgcggaagtgaattggttcggggccgtggtggacctcgttgtatgtctatgccatttgaacgtgaagaagtg

SEQ ID NO: 4502 - protein, 409 aa, Streptococcus pneumoniae
  arginine deiminase (arcA); Cellular location: cytoplasm; Similar to strain R6 sequence 15903996 (e-139)
MSSHPIQVFSEIGKLKKVMLHRPGKELENLLPDYLERLLFDDIPFLEDAQKEHDAFAQALRDEGIEVLYLEQLAAESLTSPEIRDQFIEEYLDEANIRDRQTKVAIRELLHGIKDNQELVEKTMAGIQKVELPEIPDEAKDLTDLVESEYPFAIDPMPNLYFTRDPFATIGNAVSLNHMFADTRNRETLYGKYIFKYHPIYGGKVDLVYNREEDTRIEGGDELVLSKDVLAVGISQRTDAASIEKLLVNIFKKNVGFKKVLAFEFANNRKFMHLDTVFTMVDYDKFTIHPEIEGDLHVYSVTYENEKLKIVEEKGDLAELLAQNLGVEKVHLIRCGGGNIVAAAREQWNDGSNTLTIAPGVVVVYDRNTVTNKILEEYGLRLIKIRGSELVRGRGGPRCMSMPFEREEV

SEQ ID NO: 4503 - DNA, 90 bp, Streptococcus pneumoniae
ttgtcattttattatttcctctttctattttttacattttctattgacgaatatcgaacagcgattacacttcttcacgttcaaatggca

SEQ ID NO: 4504 - protein, 30 aa, Streptococcus pneumoniae
  hypothetical protein
MSFYYFLFLFFTFSIDEYRTAITLLHVQMA

SEQ ID NO: 4505 - DNA, 1014 bp, Streptococcus pneumoniae
atgacaaattcagtattccaaggacgcagcttcttagcagaaaaagactttacccgtgcagagttagaataccttattggtctttcagctcacttgaaagatttgaaaaaacgcaatattcaacaccactaccttgctggcaagaatatcgctctcctatttgaaaaaacatctactcgtactcgtgcagcctttacaactgcggctatcgaccttggtgctcacccagaatacctcggagcaaatgatattcagttgggtaaaaaagaatctactgaagatactgctaaagtattgggacgtatgtttgacgggattgaattccgcggattcagccaacgtatggttgaagaattggcagaattctcaggcgttccagtatggaacggtctaactgacgaatggcacccaactcaaatgctcgctgactacttgactgttcaagaaaacttcggtcgcttggaaggcttgacattggtatactgtggtgatggacgtaacaacgttgccaacagcttgctcgtaacaggtgctatccttggtgtcaatgttcacatcttctcaccaaaagaactcttcccagaaaaagaaatcgttgaattggcagaaggatttgctaaagaaagtggcgcacatgttctcatcactgaagatgctgatgaagcagttaaagatgcagacgttctttacacagacgtttgggtatcaatgggtgaagaagacaaattcgcagaacgtgtagctcttcttaaaccttaccaagtcaatatggacttagttaaaaaagcaggcaatgaaaacttgatcttcctacactgcttgccagcattccacgatactcacactgtttatggtaaagacgttgctgaaaaatttggtgtagaagaaatggaagtaacagacgaagtcttccgcagcaagtacgctcgccacttcgatcaagcagaaaaccgtatgcacactatcaaagctgttatggctgctacacttggtaacctttatattcctaaagta

SEQ ID NO: 4506 - protein, 338 aa, Streptococcus pneumoniae
  ornithine carbamoyltransferase (argF); Cellular location: membrane; Similar to strain R6 sequence 15903998 (0.E+01)
MTNSVFQGRSFLAEKDFTRAELEYLIGLSAHLKDLKKRNIQHHYLAGKNIALLFEKTSTRTRAAFTTAAIDLGAHPEYLGANDIQLGKKESTEDTAKVLGRMFDGIEFRGFSQRMVEELAEFSGVPVWNGLTDEWHPTQMLADYLTVQENFGRLEGLTLVYCGDGRNNVANSLLVTGAILGVNVHIFSPKELFPEKEIVELAEGFAKESGAHVLITEDADEAVKDADVLYTDVWVSMGEEDKFAERVALLKPYQVNMDLVKKAGNENLIFLHCLPAFHDTHTVYGKDVAEKFGVEEMEVTDEVFRSKYARHFDQAENRMHTIKAVMAATLGNLYIPKV

SEQ ID NO: 4507 - DNA, 945 bp, Streptococcus pneumoniae
atggcaaatcgtaaaattgtagtagctttgggaggaaatgcgattctttcttctgacccatcagcaaaggctcaacaagaagctttagttgaaacagctaagcatcttgtaaaattgattaaaaatggagatgatctgattatcactcacggtaatggacctcaagttgggaatctcttgctccaacatttggcatcagactctgaaaagaaccctgccttcccactcgactcacttgtcgctatgacagaaggtagcatcggtttctggttgaaaaatgctttgcaaaatgctctcttggatgaaggcatcgaaaaaaatgttgcctctgttgtaacgcaagttgtcgtagataaaaatgatccagcttttgttaacttgagtaaaccaatcggtcctttctattcagaagaagaagcaaaagcagaagccgaaaaaagcggagcgactttcaaggaagatgctggccgtggctggcgtaaggtcgttgcctcaccaaaacctgttgacatcaaagaaattgaaaccatccgtactcttttaaataatggtcaagtcgtcgtagctgcaggtggtggcggtattcccgtcgtcaaagaaaacaatggacatttgactggtgtcgaagcggttattgataaagacttcgcttcccaacgtttggcagaattggttgatgcagacctcttcatcgttttgacaggtgtagattatgtatttgttaactacaacaagccaaaccaggaaaaattggaacatgtgaatgttgcccagctggaagaatatatcaaacaagatcagtttgcaccaggtagcatgcttccaaaagtagaagcagctatcgcttttgtcaatggtcgtccagaaggaaaagcagttattacttcccttgaaaatctaggcgccttgattgaatctgaaagcggaacaattattgaaaaagga

SEQ ID NO: 4508 - protein, 315 aa, Streptococcus pneumoniae
  carbamate kinase (arcC); Cellular location: cytoplasm; Similar to strain R6 sequence 15903999 (e-177)
MANRKIVVALGGNAILSSDPSAKAQQEALVETAKHLVKLIKNGDDLIITHGNGPQVGNLLLQHLASDSEKNPAFPLDSLVAMTEGSIGFWLKNALQNALLDEGIEKNVASVVTQVVVDKNDPAFVNLSKPIGPFYSEEEAKAEAEKSGATFKEDAGRGWRKVVASPKPVDIKEIETIRTLLNNGQVVVAAGGGGIPVVKENNGHLTGVEAVIDKDFASQRLAELVDADLFIVLTGVDYVFVNYNKPNQEKLEHVNVAQLEEYIKQDQFAPGSMLPKVEAAIAFVNGRPEGKAVITSLENLGALIESESGTIIEKG

SEQ ID NO: 4509 - DNA, 1509 bp, Streptococcus pneumoniae
atgagtgaaaaagctaaaaaagggtttaagatgccttcatcttacaccgtattattgataatcattgctattatggcagtgctaacttggtttatccctgcgggggcctttatagaaggtatttacgagactcagcctcaaaatccacaagggatttgggatgtcctcatggcaccgattcgggctatgctaggtactcatccagaggaaggttcgctcattaaagaaacgagcgcagcgattgatgtagccttcttcatccttatggttggtggtttccttggcattgtcaacaaaactggtgctcttgacgtagggattgcctctatcgtgaagaagtataagggccgcgaaaaaatgttaattttggtactgatgcctttgtttgccctcggtggtacaacttatggtatgggtgaagaaacaatggccttctatccactccttgtgccagttatgatggccgttggttttgatagcctgactggtgttgcaattattttgctcggttctcaaatcggctgtttggcatctactctgaatccatttgcgacaggtattgcttcagcgactgcgggagttggtacaggggacggtatcgtacttcgtctgatcttctgggttaccttgactgctcttagtacttggtttgtttaccgttatgcggataagattcaaaaagatccgactaagtcactggtttatagtactcgcaaagaagatttgaaacactttaacgtagaagaatcttcatctgtagaatctacacttagcagcaaacaaaaatcagttctcttcttatttgtgttgacattcatcttgatggtattgagcttcattccatggacagaccttggcgttaccatttttgatgactttaatacttggttgactggtcttccagttattggtaatattgtcggttcatctacttctgcactaggtacttggtacttcccagaaggcgcaatgctctttgcctttatgggtatcctgattggtgttatttatggtcttaaagaagataagattatctcttccttcatgaatggtgctgctgacttgctcagtgttgccttgatcgtagcgattgctcgtggtattcaagttatcatgaacgacggtatgattaccgatacaatcctcaactggggtaaagaaggcttgagcggtctatcttcacaagtctttatcgttgtaacttatatcttctatctacctatgtcattcttgatcccatcttcatctggtcttgccagcgcaactatgggtatcatggctccacttggagaatttgtaaatgtccgtcctagcttgattatcactgcttaccaatctgcttcaggtgtcttgaacttgattgcaccaacatctggtattgtgatgggagctcttgcacttggacgtatcaacattggtacttggtggaaattcatgggcaaactcgtagtcgctattattgtagtgaccatcgcccttcttctccttggaaccttccttccattccta

SEQ ID NO: 4510 - protein, 503 aa, Streptococcus pneumoniae
  conserved hypothetical protein; Cellular location: membrane; Similar to strain R6 sequence 15904000 (0.E+01)
MSEKAKKGFKMPSSYTVLLIIIAIMAVLTWFIPAGAFIEGIYETQPQNPQGIWDVLMAPIRAMLGTHPEEGSLIKETSAAIDVAFFILMVGGFLGIVNKTGALDVGIASIVKKYKGREKMLILVLMPLFALGGTTYGMGEETMAFYPLLVPVMMAVGFDSLTGVAIILLGSQIGCLASTLNPFATGIASATAGVGTGDGIVLRLIFWVTLTALSTWFVYRYADKIQKDPTKSLVYSTRKEDLKHFNVEESSSVESTLSSKQKSVLFLFVLTFILMVLSFIPWTDLGVTIFDDFNTWLTGLPVIGNIVGSSTSALGTWYFPEGAMLFAFMGILIGVIYGLKEDKIISSFMNGAADLLSVALIVAIARGIQVIMNDGMITDTILNWGKEGLSGLSSQVFIVVTYIFYLPMSFLIPSSSGLASATMGIMAPLGEFVNVRPSLIITAYQSASGVLNLIAPTSGIVMGALALGRINIGTWWKFMGKLVVAIIVVTIALLLLGTFLPFL

SEQ ID NO: 4511 - DNA, 1329 bp, Streptococcus pneumoniae
atgaaaatagatataacaaatcaagttaaagatgaatttcttatatcattaaaaaccttgatttcctatccttcagtactcaatgaaggagaaaatggaacaccttttggacaagcaatccaagatgtcctagaaaaaactttagagatttgtcgagacataggtttcactacctatcttgaccctaaaggttattacggatatgcagaaatcggtcagggagcagagcttctggccattctctgtcatttggatgttgttccatcaggtgatgaagcagattggcagacaccgccatttgaagcaactatcaaagacggctgggtattcggacgtggtgtccaagatgataaaggcccttcgctcgcagctctctatgcagtaaaaagcttgctggaccaaggtattcagttcaaaaagcgcgtacgctttatctttggtaccgatgaggaaaccctctggcgctgcatggcacgctacaataccatcgaagaacaggccagtatgggctttgcacctgactcatcttttcctctgacctatgctgaaaaagggcttctacaggtcaaacttcatggccctggatcggatcaactagagcttgaagtaggaggcgcctttaacgttgtaccagacaaggccaactaccaaggtctcctctatgaacaggtttgtaacggtctcaaagaagctggttatgattaccaaaccactgaacaaaccgtaacggttctcggagtgccaaagcatgctaaggatgctagtcaaggtatcaatgctgtcatccgactagctaccattcttgctcctctccaagaacaccctgctctcagttttcttgcaacacaagcaggtcaagacggcacaggaagacaaatctttggtgatatagcagatgaaccttctggtcacctatcctttaatgtcgcaggtctcatgatcaatcatgaacgttctgaaatccgtattgacattcggactcctgtcttagctgacaaggaagaactagtagagttgcttacaagatgtgcacaaaactaccaactccgctacgaagagtttgactatctagcgcctctatacgtcgcagaagacagtaaactcgttagcacactgatgcaaatctaccaagaaaagactggcgataacagtcctgctatttcatccggtggtgccacttttgctcgcaccatgccaaattgtgtagccttcggcgccttattcccaggagcgaagcagacagaacatcaggcaaatgaatgtgccgttctagaagatttgtaccgtgctatggatatttatgccgaagccgtctatcgacttgcaact

SEQ ID NO: 4512 - protein, 443 aa, Streptococcus pneumoniae
  peptidase, M20/M25/M40 family; Cellular location: cytoplasm; Similar to strain R6 sequence 15904001 (0.E+01)
MKIDITNQVKDEFLISLKTLISYPSVLNEGENGTPFGQAIQDVLEKTLEICRDIGFTTYLDPKGYYGYAEIGQGAELLAILCHLDVVPSGDEADWQTPPFEATIKDGWVFGRGVQDDKGPSLAALYAVKSLLDQGIQFKKRVRFIFGTDEETLWRCMARYNTIEEQASMGFAPDSSFPLTYAEKGLLQVKLHGPGSDQLELEVGGAFNVVPDKANYQGLLYEQVCNGLKEAGYDYQTTEQTVTVLGVPKHAKDASQGINAVIRLATILAPLQEHPALSFLATQAGQDGTGRQIFGDIADEPSGHLSFNVAGLMINHERSEIRIDIRTPVLADKEELVELLTRCAQNYQLRYEEFDYLAPLYVAEDSKLVSTLMQIYQEKTGDNSPAISSGGATFARTMPNCVAFGALFPGAKQTEHQANECAVLEDLYRAMDIYAEAVYRLAT

SEQ ID NO: 4513 - DNA, 141 bp, Streptococcus pneumoniae
ttggggtgttttattatgaaattgagttatgaagataaagttcagatctatgaactaagaaagcaaggacaaagcttcaaacagctttcaaaaagatttggtgtggatgtttctggtctaaagtcatctgaatctttgaga

SEQ ID NO: 4514 - protein, 47 aa, Streptococcus pneumoniae
  IS3-Spn1, hypothetical protein, truncation; Cellular location: cytoplasm; Similar to strain R6 sequence 15902399 (2.E-09)
MGCFIMKLSYEDKVQIYELRKQGQSFKQLSKRFGVDVSGLKSSESLR

SEQ ID NO: 4515 - DNA, 90 bp, Streptococcus pneumoniae
ttgaaggctgcttatgtttttcctaagattttttcaaaaatatatttatcagatagcggtttgtcttcttcttcagcttggtttttgtat

SEQ ID NO: 4516 - protein, 30 aa, Streptococcus pneumoniae
  hypothetical protein
MKAAYVFPKIFSKIYLSDSGLSSSSAWFLY

SEQ ID NO: 4517 - DNA, 96 bp, Streptococcus pneumoniae
atgaaggatttgttccttatgtttcaaattaatacaaaaaccaagctgaagaagaagacaaaccgctatctgataaatatatttttgaaaaaatct

SEQ ID NO: 4518 - protein, 32 aa, Streptococcus pneumoniae
  hypothetical protein
MKDLFLMFQINTKTKLKKKTNRYLINIFLKKS

SEQ ID NO: 4519 - DNA, 264 bp, Streptococcus pneumoniae
atgatgggagatgggatgaaagaatttcaatttgagagaaagcagcgtttttctttgaggccatatgcaataggagcttgttcggtcttgctaggaacgagtttattttttgctggtatgggtgctcagcctgtacaggatacagaaacgagttcagcactaatttcaagtcattatttggatgagcaggatttatctgaaaagctgaaatctgagttgcaatggtttgaattagaaaacaagcttttgaacttatgggagcat

SEQ ID NO: 4520 - protein, 88 aa, Streptococcus pneumoniae
  conserved domain protein
MMGDGMKEFQFERKQRFSLRPYAIGACSVLLGTSLFFAGMGAQPVQDTETSSALISSHYLDEQDLSEKLKSELQWFELENKLLNLWEH

SEQ ID NO: 4521 - DNA, 183 bp, Streptococcus pneumoniae
atgttactgacttcgtcagttctatctgcaacctcaaaacagtgttttgagctgacttcgtcagttctatctgcaacctcaaaacggtgttttgagcaacctgtggctagtttcctaatttgctctttgattttcattgagtacaaagagcttggtaacaggctctttttgtattgcgtttat

SEQ ID NO: 4522 - protein, 61 aa, Streptococcus pneumoniae
  box element
MLLTSSVLSATSKQCFELTSSVLSATSKRCFEQPVASFLICSLIFIEYKELGNRLFLYCVY

SEQ ID NO: 4523 - DNA, 165 bp, Streptococcus pneumoniae
ttgtactcaatgaaaatcaaagagcaaattaggaaactagccacaggttgctcaaaacaccgttttgaggttgcagatagaactgacgaagtcagctcaaaacactgttttgaggttgcagatagaactgacgaagtcagtaacatctatacggcaaggcgacgc

SEQ ID NO: 4524 - protein, 55 aa, Streptococcus pneumoniae
  hypothetical protein
MYSMKIKEQIRKLATGCSKHRFEVADRTDEVSSKHCFEVADRTDEVSNIYTARRR

SEQ ID NO: 4525 - DNA, 897 bp, Streptococcus pneumoniae
atggcaatatttttcatgatttttctgattgtttgtgtgctcctattggtgatagtcacactgagtacagtttatgtggttcgtcagcagtcggtggcgattattgaacgctttgggaaataccaaaaggttgctaatagcggtattcatattcgcttgccttttgggattgactcgattgcagcacggattcagttgcgcttgttgcaaagtgatattgtggttgagactaagaccaaggacaatgtgttcgttatgatgaatgtagcgactcagtaccgtgtcaacgagcagagcgtgacagatgcttactataaactcatacgtccagaatctcagattaaatcttatatcgaagatgctcttcgctcttctgttccaaaattaaccttggatgaattgtttgagaaaaaagatgagattgcccttgaagttcaacaccaagtagcagaagaaatgaccacttacggctacattatcgtgaaaaccttgattaccaaggtcgaaccagatgcagaagttaagcaatccatgaatgaaatcaatgcggcgcaacgtaagcgggtcgcagcacaagaattggcggaagctgacaagattaaaattgtcactgcagctgaagcagaagcagaaaaagaccgccttcatggtgtggggattgcccaacaacgtaaggcgattgtggatggattggcagagtctatcaccgaactcaaggaagccaatgttggcatgacagaagaacaaatcatgtctatcctcttgaccaaccagtatttggataccttgaatacctttgcctctaaaggaaatcaaactatctttttaccaaatactccaaatggtgtggatgatatccgaacacaaatcttgtcagcccttcgcgctgagaagaaa

SEQ ID NO: 4526 - protein, 299 aa, Streptococcus pneumoniae
  SPFH domain/Band 7 family; Cellular location: cytoplasm; Similar to strain R6 sequence 15904003 (e-149)
MAIFFMIFLIVCVLLLVIVTLSTVYVVRQQSVAIIERFGKYQKVANSGIHIRLPFGIDSIAARIQLRLLQSDIVVETKTKDNVFVMMNVATQYRVNEQSVTDAYYKLIRPESQIKSYIEDALRSSVPKLTLDELFEKKDEIALEVQHQVAEEMTTYGYIIVKTLITKVEPDAEVKQSMNEINAAQRKRVAAQELAEADKIKIVTAAEAEAEKDRLHGVGIAQQRKAIVDGLAESITELKEANVGMTEEQIMSILLTNQYLDTLNTFASKGNQTIFLPNTPNGVDDIRTQILSALRAEKK

SEQ ID NO: 4527 - DNA, 1149 bp, Streptococcus pneumoniae
atggctatattttatgttccggcagtcaaccttattggaaaaggtgttgtaaatgaagtgggtccttatatcaaggaacttggctataaaaaggcacttttggtgacagataagtacatcgaaggcagtgatattttacctaagactttaaaaccactggatacagaaggaatcgaatatgtcatctttagcgatgtagagccaaaccctacttgtaaaaatgtcacagatggggtagctgctttgcaagaacatggctgtgactttatcatcagtcttggcgggggttctccacaggatgcagctagttgtatttctatcatggctacaaatggtggaaaaccacaggattatgaagggcttcataagtctgctaaaaaaggcttgccagttgtggctatcaatacaacggcaggtacatcagcagaaattaccattaactatgtgattactgatgaagaacgcaaggttaagatggtaatggttgacaagaatagccttgctcttatctctgttaatgaccctgaactcatgctttccaaacctaaaggcctgactgctgctactggtatggatgctctgactcatgctgttgaagctttggtaacacctggtgcttatgatgtaaccaagaaactgtctattggtgctattgagcttatcaaggaatatcttcctcgtgctgtagaaaatggacatgatattgaagcgcgtgaaggtatggtcaatgccatcttccttggtggtatgagctttaataatgctggtcttggctatgttcactcaatggctcaccaactcggtgcagtatataatttgccacatggcgtgtgctgtgccatgttgctaccagttatagaacgtgaaaatgctaaacgtgtaccagaagctttccgcaatgttgccaaagccttgggacttcatgtagaaggtaaatcagatcaagaatgtgccgattatgcgattgctgagattgagaagctttctgagacagtaggtattcctaagaaactgactgaacttggtattgaagaaaaagatttcgactttgaatacctttctaagaatgccttgattgatgcctgcgcaccaggaaatccatttatgccaaccttagaagaaacgattgccttttataaagagttattt

SEQ ID NO: 4528 - protein, 383 aa, Streptococcus pneumoniae
  alcohol dehydrogenase, iron-containing; Cellular location: cytoplasm; Similar to strain R6 sequence 15904004 (0.E+01)
MAIFYVPAVNLIGKGVVNEVGPYIKELGYKKALLVTDKYIEGSDILPKTLKPLDTEGIEYVIFSDVEPNPTCKNVTDGVAALQEHGCDFIISLGGGSPQDAASCISIMATNGGKPQDYEGLHKSAKKGLPVVAINTTAGTSAEITINYVITDEERKVKMVMVDKNSLALISVNDPELMLSKPKGLTAATGMDALTHAVEALVTPGAYDVTKKLSIGAIELIKEYLPRAVENGHDIEAREGMVNAIFLGGMSFNNAGLGYVHSMAHQLGAVYNLPHGVCCAMLLPVIERENAKRVPEAFRNVAKALGLHVEGKSDQECADYAIAEIEKLSETVGIPKKLTELGIEEKDFDFEYLSKNALIDACAPGNPFMPTLEETIAFYKELF

SEQ ID NO: 4529 - DNA, 1764 bp, Streptococcus pneumoniae
atgattcaacatccacgtattgggattcgtccgactattgatggtcgtcgtcaaggtgtacgcgaatcacttgaagtgcaaacaatgaacatggctaaaagtgtggcagatttgatttcaagcacattgaaatatccagatggggaacctgtggaatgcgtgatttctccatctactattggccgtgtaccagaggctgcagcttcccatgagttgtttaaaaaatcaaatgtttgcgcaacaattacagttacaccatgctggtgttatggtagtgaaactatggatatgtctccagatattcctcatgctatttggggatttaatgggacagaacgcccaggagctgtctatcttgcagctgtactagcttcacatgctcaaaaagggattccagcctttgggatttatggaagagatgttcaggaagctagtgacacagatattccagaagatgtcaaagaaaaacttttacgctatgcgcgtgcagctcttgcaactggcttgatgagagacactgcttacctatcaatgggtagtgtttcgatggggattggtggttctattgtaaatccggatttcttccaagaatacttaggaatgcgaaatgaatcggtagatatgacggagttcacgcgccgtatggaccgtggtatttacgaccctgaagagttcgaacgtgcgctcaaatgggtgaaagaaaacgtaaaagaaggattcgaccataaccgtgaagaccttgttttaagccgtgaagaaaaagatagacaatgggaatttgttattaagatgttcatgattggacgtgacttaatggttggtaacccaagacttgctgaacttggttttgaggaagaagcggttggtcaccatgctttagtagctggtttccaaggtcaacgtcagtggacagaccattttccaaatggggactttatggaaactttcctcaatactcagtttgactggaatggtattcgaaaaccatttgtatttgcgacagagaatgattcactaaatggtgtgtctatgctctttaattatctattaacaaatactccacaaatctttgctgatgtgcgtacttattggagcccagaggctgttaaacgtgtaacgggacatactttagagggtcgtgctgcagctggcttcttacatctaatcaactctggttcttgtacattggatggtacaggtcaagctactcgagatggcaaacctattatgaaaccattctgggagttggaagaaagtgaagtgcaggctatgcttgaaaatacagacttcccaccagcaaaccgcgaatacttccgtggaggaggattctcaactcgtttcttgacgaagggggatatgccagtaacaatggtacgtctcaatcttctaaaaggggttggtccagtgctacaaattgcagaaggttacacacttgaacttcctgaagatgttcaccatactttagataatcgtacagatccaggatggccaactacttggtttgctccacgtttgacaggaaaaggtgctttcaagtctgtctatgacgtcatgaataattggggagctaatcacggagccataacatatggacacattggagcagacttgattaccttggcttctatgttgagaattcctgtcaatatgcataatgtacctgaggaagatatctttagacctaaaaattggtccttatttggaacagaagatctagaatcagcagactatcgtgcatgtcagttgttggggccactacataaa

SEQ ID NO: 4530 - protein, 588 aa, Streptococcus pneumoniae
  L-fucose isomerase (fucI); Cellular location: cytoplasm; Similar to strain R6 sequence 15904005 (0.E+01)
MIQHPRIGIRPTIDGRRQGVRESLEVQTMNMAKSVADLISSTLKYPDGEPVECVISPSTIGRVPEAAASHELFKKSNVCATITVTPCWCYGSETMDMSPDIPHAIWGFNGTERPGAVYLAAVLASHAQKGIPAFGIYGRDVQEASDTDIPEDVKEKLLRYARAALATGLMRDTAYLSMGSVSMGIGGSIVNPDFFQEYLGMRNESVDMTEFTRRMDRGIYDPEEFERALKWVKENVKEGFDHNREDLVLSREEKDRQWEFVIKMFMIGRDLMVGNPRLAELGFEEEAVGHHALVAGFQGQRQWTDHFPNGDFMETFLNTQFDWNGIRKPFVFATENDSLNGVSMLFNYLLTNTPQIFADVRTYWSPEAVKRVTGHTLEGRAAAGFLHLINSGSCTLDGTGQATRDGKPIMKPFWELEESEVQAMLENTDFPPANREYFRGGGFSTRFLTKGDMPVTMVRLNLLKGVGPVLQIAEGYTLELPEDVHHTLDNRTDPGWPTTWFAPRLTGKGAFKSVYDVMNNWGANHGAITYGHIGADLITLASMLRIPVNMHNVPEEDIFRPKNWSLFGTEDLESADYRACQLLGPLHK

SEQ ID NO: 4531 - DNA, 3114 bp, Streptococcus pneumoniae
atgaataaagaaaaaataaaaagaaaattaatcacaatattgtttgtatgtattgggatgttatgttttggattgttagcaggagttaaggctgataatcgtgttcaaatgagaacgacgattaataatgaatcgccattgttgctttctccgttgtatggcaatgataatggtaacggattatggtgggggaacacattgaagggagcatgggaagctattcctgaagatgtaaagccatatgcagcgattgaacttcatcctgcaaaagtctgtaaaccaacaagttgtattccacgagatacgaaagaattgagagaatggtatgtcaagatgttggaggaagctcaaagtctaaacattccagttttcttggttattatgtcggctggagagcgtaatacagttcctccagagtggttagatgaacaattccaaaagtatagtgtgttaaaaggtgttttaaatattgagaattattggatttacaataaccagttagctccgcatagtgctaaatatttggaagtttgtgccaaatatggagcgcattttatctggcatgatcatgaaaaatggttctgggaaactattatgaatgatccgacattctttgaagcgagtcaaaaatatcataaaaatttggtgttggcaactaaaaatacgccaataagagatgatgcgggtacagattctatcgttagtggattttggttgagtggcttatgtgataactggggctcatcaacagatacatggaaatggtgggaaaaacattatacaaacacatttgaaactggaagagctagggatatgagatcctatgcatcggaaccagaatcaatgattgctatggaaatgatgaatgtatatactgggggaggcacagtttataatttcgaatgtgccgcgtatacatttatgacaaatgatgtaccaactccagcatttactaaaggtattattcctttctttagacatgctatacaaaatccagctccaagtaaggaagaagttgtaaatagaacaaaagctgtattttggaatggagaaggtaggattagttcattaaacggattttatcaaggactttattcgaatgatgaaacaatgcctttatataataatgggagatatcatattcttcctgtaatacatgagaaaattgataaggaaaagatttcatctatattccctaatgcaaaaattttgactaaaaatagtgaggaattgtctagtaaagtcaactatttaaactcgctttatccaaaactttatgaaggagatgggtatgctcagcgtgtaggtaattcctggtatatttataatagtaatgctaatatcaataaaaatcagcaagtaatgttgcctatgtatactaataatacaaagtcgttatcgttagatttgacgccacatacttacgctgttgttaaagaaaatccaaataatttacatattttattgaataattacaggacagataagacagctatgtgggcattatcaggaaattttgatgcatcaaaaagttggaagaaagaagaattagagttagcgaactggataagcaaaaattattccatcaatcctgtagataatgactttaggacaacaacacttacattaaaagggcatactggtcataaacctcagataaatataagtggcgataaaaatcattatacttatacagaaaattgggatgagaatacccatgtttataccattacggttaatcataatggaatggtagagatgtctataaatactgaggggacaggtccagtctctttcccaacaccagataaatttaatgatggtaatttgaatatagcatatgcaaaaccaacaacacaaagttctgtagattacaatggagaccctaatagagctgtggatggtaacagaaatggtaattttaactctggttcggtaacacacactagggcagataatccctcttggtgggaagtcgatttgaaaaaaatggataaagttgggcttgttaaaatttataatcgcacagatgctgagactcaacgtctatctaattttgatgtgattctatatgacaataatagaaacgaagttgctaagaaacatgttaataatttgtcgggtgaatctgttagtctagatttcaaagaaaaaggagcaaggtatattaaagttaaattactaacgagtggagtgcctttgagtttagcagaagtagaggtttttagagaatcagatggtaagcaatctgaagaggatatagataaaataacagaagataaagtagtctctacaaataaggtagctactcaaagttcaaccaattatgagggtgtagctgctttagcagttgatggtaataaagatggagattacggacatcattcggtgactcatactaaggcagattctaacgcttggtggcaggtcgatctgggagaagagtttacggtttctaaagttgatatttataatagaacagatgccgaacctcagcgtttatctaattttgatgttatttttctatcttcatcaggagaagaagtttttagaagacattttgataaagtagttgatggtttgttatctttaaaagtaccttctgtaggggctaagctagtcaaaatagaattaaaatcagcagctattccgttaagtttagcggaagttgaagtctatggttcaaagagaactccgaagaaactttctaatattgcattaacaaaagaaactcgacagagttcaacggattacaatggtttttctcgtctagcagttgatggaaataaaaacggagattatggtcatcattcagtgactcataccaaagaagattctccttcatggtgggagatagatttagcacaaaccgaagaattagaaaagttaattatttataatagaacagatgctgaaattcagagattatcaaattttgatattattatatatgattcaaatgattatgaagtttttacacaacatattgacagtttagaaagcaataatctatccatagacttaaaaggactgaagggaaaaaaggttagaatttctttgagaagcgcaggaattcctttaagtttagcagaggtagaggtttatacttataag

SEQ ID NO: 4532 - protein, 1038 aa, Streptococcus pneumoniae
  fucolectin-related protein; Cellular location: outside; Similar to strain R6 sequence 15904006 (0.E+01)
MNKEKIKRKLITILFVCIGMLCFGLLAGVKADNRVQMRTTINNESPLLLSPLYGNDNGNGLWWGNTLKGAWEAIPEDVKPYAAIELHPAKVCKPTSCIPRDTKELREWYVKMLEEAQSLNIPVFLVIMSAGERNTVPPEWLDEQFQKYSVLKGVLNIENYWIYNNQLAPHSAKYLEVCAKYGAHFIWHDHEKWFWETIMNDPTFFEASQKYHKNLVLATKNTPIRDDAGTDSIVSGFWLSGLCDNWGSSTDTWKWWEKHYTNTFETGRARDMRSYASEPESMIAMEMMNVYTGGGTVYNFECAAYTFMTNDVPTPAFTKGIIPFFRHAIQNPAPSKEEVVNRTKAVFWNGEGRISSLNGFYQGLYSNDETMPLYNNGRYHILPVIHEKIDKEKISSIFPNAKILTKNSEELSSKVNYLNSLYPKLYEGDGYAQRVGNSWYIYNSNANINKNQQVMLPMYTNNTKSLSLDLTPHTYAVVKENPNNLHILLNNYRTDKTAMWALSGNFDASKSWKKEELELANWISKNYSINPVDNDFRTTTLTLKGHTGHKPQINISGDKNHYTYTENWDENTHVYTITVNHNGMVEMSINTEGTGPVSFPTPDKFNDGNLNIAYAKPTTQSSVDYNGDPNRAVDGNRNGNFNSGSVTHTRADNPSWWEVDLKKMDKVGLVKIYNRTDAETQRLSNFDVILYDNNRNEVAKKHVNNLSGESVSLDFKEKGARYIKVKLLTSGVPLSLAEVEVFRESDGKQSEEDIDKITEDKVVSTNKVATQSSTNYEGVAALAVDGNKDGDYGHHSVTHTKADSNAWWQVDLGEEFTVSKVDIYNRTDAEPQRLSNFDVIFLSSSGEEVFRRHFDKVVDGLLSLKVPSVGAKLVKIELKSAAIPLSLAEVEVYGSKRTPKKLSNIALTKETRQSSTDYNGFSRLAVDGNKNGDYGHHSVTHTKEDSPSWWEIDLAQTEELEKLIIYNRTDAEIQRLSNFDIIIYDSNDYEVFTQHIDSLESNNLSIDLKGLKGKKVRISLRSAGIPLSLAEVEVYTYK

SEQ ID NO: 4533 - DNA, 2292 bp, Streptococcus pneumoniae
gtgaaattatggtataagaaagctgccgcaaattggaatgaagccttgccgattgggaacggtcatttaggtggtatgatttatggttcagctacaaaagaatgtattcaactaaacgatgagactatttggtatagaggaaagtcagatagaaataatccagactcactattgcatcttaaaaaaattcgggaatatcttttagatggagaaattcagaaagccgaagaattgataaagttaacagtgtttgctaccccaagagatcaaagccactatgaattacttggggaactttacattgagcatatagatattcagtcttgtgctctttcattgtatgaaagagagctagatttagatacagctatttctaatgttgtgtttgagcctaatagttgtaatttacaaataaaaagagaatattttacgagttttaataagaatattttatgttgccgtatagtgtcatcagttcaaaacacattaaatttaaacattaatttgggtagaaataaacggtttaatgacgaagtatctaaactggattcaagtacaattttaatgtcggcctctgctggaggtagaaaaggtgttcagtttaaagtagtatgtcattctaaggttacggatggtgaagtaagtgtattgggagagacaatagttattcggaatgctacagaggtatttctttatctcaaatcaatgacggattattggggaaatatagatatttcttctcttcagggagaatttagtagtattgattactttacagaaaaagatgaacatgtaaaaaaatatcaggagcaatttaatagagttgattttaaactagactatagtaaaggttgtcttagcattccaacgaatctacttcttgaaaacactaaaaagtatagtaactacttgactaacttgttatttcattatggaagatatctgttaatatcgtctagtcaaccgaatggtttacctgccaatcttcaaggaatatggtgtgatgaattaaatccaatttggggttctaaatatacgattaatattaatactcaaatgaattattggatggtaggtccatgtgatttaccagaagtagaatatccattatttgatatgctcgaaagaatgagagaaccgggaagactaaccgctaagaaaatgtatggagctagaggttttacagcacatcataatacggatggttttggcgatacggctccccaatctcatgccatgggggctgcaatttgggtattaactattccatggttatgtactcatatttgggaacactatttatatttccaagatgagcgtattcttacggaacattttgaaatgataaaagaagcatttcttttctttgaagattatttatttgaggtggatggctacttgatgacaggtccaagtgtctcaccggaaaataaatatcgcttaaaaaatggtattgaaggaaatgcttgtctatcatctacaattgataatcaaattctaagatatttttgtgattcatgcattggcattgcaaaacaattaggagacaattcggattttattagtcgtgtgaaggagttaaaaaagaaactacctaaaacaaaaataggtagtaatgggcaaatccaagaatggttagaagattatgaagaagtagagcctgggcatagacacatttcacctctatttgggctttatccttataatgagattgatattcataaaactccggaattagcagaagcagctaaaatcactatcaataggagattatcaaacgctaattttttatcttcacaggagagggagcaagcgattaataattggttagtaagtggtttgcatgctagtacacaaacaggttggagtgctgcatggctgattcatttttttgcgagactatatcaaggtgaacctgcttataaccagattaatggtttgttaaataatgcgactcttggcaatttatttcttgaccatccaccatttcaaattgatggtaatttaggtttggtgagtggaatttgtgaattattagtacagagccatcataattggttatcactaattccagctttaccttctgcttggtcagaaggagaagtgaaaggtttcagagtaagaggaggatataaggtatcgtttgcttggaaaaatggggatataacattcctaaaattggaaggaggaaacaaagatcaaaaagtaagagtaagaatatatggcaaaaatactgatgtacaaaatattgaattggtatttaattcagaaaaaattattgagttaaatttt

SEQ ID NO: 4534 - protein, 764 aa, Streptococcus pneumoniae
  conserved hypothetical protein; Cellular location: cytoplasm; Similar to strain R6 sequence 15904007 (0.E+01)
MKLWYKKAAANWNEALPIGNGHLGGMIYGSATKECIQLNDETIWYRGKSDRNNPDSLLHLKKIREYLLDGEIQKAEELIKLTVFATPRDQSHYELLGELYIEHIDIQSCALSLYERELDLDTAISNVVFEPNSCNLQIKREYFTSFNKNILCCRIVSSVQNTLNLNINLGRNKRFNDEVSKLDSSTILMSASAGGRKGVQFKVVCHSKVTDGEVSVLGETIVIRNATEVFLYLKSMTDYWGNIDISSLQGEFSSIDYFTEKDEHVKKYQEQFNRVDFKLDYSKGCLSIPTNLLLENTKKYSNYLTNLLFHYGRYLLISSSQPNGLPANLQGIWCDELNPIWGSKYTININTQMNYWMVGPCDLPEVEYPLFDMLERMREPGRLTAKKMYGARGFTAHHNTDGFGDTAPQSHAMGAAIWVLTIPWLCTHIWEHYLYFQDERILTEHFEMIKEAFLFFEDYLFEVDGYLMTGPSVSPENKYRLKNGIEGNACLSSTIDNQILRYFCDSCIGIAKQLGDNSDFISRVKELKKKLPKTKIGSNGQIQEWLEDYEEVEPGHRHISPLFGLYPYNEIDIHKTPELAEAAKITINRRLSNANFLSSQEREQAINNWLVSGLHASTQTGWSAAWLIHFFARLYQGEPAYNQINGLLNNATLGNLFLDHPPFQIDGNLGLVSGICELLVQSHHNWLSLIPALPSAWSEGEVKGFRVRGGYKVSFAWKNGDITFLKLEGGNKDQKVRVRIYGKNTDVQNIELVFNSEKIIELNF

SEQ ID NO: 4535 - DNA, 798 bp, Streptococcus pneumoniae
atgatgaataataaagtaactaaagttgaacttaaaaaagttttcaaacgaagttttatgtatggttcttcatggaactatgagagaatgcagaacctaggttttctatatacaattcttccagtattgaaaaaactatacccagacaaagattcagcttctcctgcaatgaaacgtcaccttgagtttttcaatactcatcaaacagcggcaccatttattcttggagttacttccgctatggaagaacaagaaggaaatgaaggtgcagcttcaattactggtattaaagttggcttgatggggccactggctggtctaggagatagtttgttctggctgacactagttcctatctgttttagtattggtgcgtcttattctaaagacggcggtgctttaggtatctttatcgccttaatattgtttaatattattaatattcctgttaaatatttcggtttgaaatatgggtatactaagggttctagtcttatccaagaaaataatacaaaaggaacattgaatcgcgttacgagtatggcgacagcattagggctagtactagtgggtggtttgattccatcaatggttggtattaattttggattagaatttaagcagggggaacttgttatttctgttcaagaaatgattacaaaattaattccaggatttatccctatggctttgactttattaatgtgtaaattaattagaaaaggaaagaatccggttgtactaatctttagtgttatggctattggagttattctagttgttttaggaattttgaag

SEQ ID NO: 4536 - protein, 266 aa, Streptococcus pneumoniae
  PTS system, IID component; Cellular location: membrane; Similar to strain R6 sequence 15904008 (e-150)
MMNNKVTKVELKKVFKRSFMYGSSWNYERMQNLGFLYTILPVLKKLYPDKDSASPAMKRHLEFFNTHQTAAPFILGVTSAMEEQEGNEGAASITGIKVGLMGPLAGLGDSLFWLTLVPICFSIGASYSKDGGALGIFIALILFNIINIPVKYFGLKYGYTKGSSLIQENNTKGTLNRVTSMATALGLVLVGGLIPSMVGINFGLEFKQGELVISVQEMITKLIPGFIPMALTLLMCKLIRKGKNPVVLIFSVMAIGVILVVLGILK

SEQ ID NO: 4537 - DNA, 771 bp, Streptococcus pneumoniae
atgctattcacacaagcattactggtgacattagttgggattattgccactattgactataatggaccgttatttatgattcaccgtccgttagttacaagtgcaatggttggcttagtattaggagatttcacccaaggtgttcttattggttcagctcttgaattaacttggctcggtgtaacaggtattggaggttatactccaccagatactatttcaggtgcgattattggtactgcatttggtattttatctggtcaaggagaaactgctggtatcgctatagcagttccaattgcagttgctacccaacagttggatgttcttgcaaaaactttagatgtttattttgtgaaaaaagctgataatgatgctaaaaacggagattattcaaagatcggtttttatcattattcaagtttggttttaatcacgttatttaaaattgtaccaattttcctagctattatgcttggaggggaatatgtggcagacttgtttgctaaggttccaccaatcgttatgcagggacttaactctgcaggtgctttactaccttcaattggttttggtatgcttttaaatatgatgctcaagaaaaatatgtgggtattcttgttgattggattcatttgttctgtgtatggaggaatgtcaaccattgggatctcactagttggtattgcggtagcatacttctacgatatgattggaagcaaaccacaagaaacaacttcaagtagtgatgttgaggaggatcttgatcta

SEQ ID NO: 4538 - protein, 257 aa, Streptococcus pneumoniae
  PTS system, IIC component; Cellular location: membrane; Similar to strain R6 sequence 15904009 (e-144)
MLFTQALLVTLVGIIATIDYNGPLFMIHRPLVTSAMVGLVLGDFTQGVLIGSALELTWLGVTGIGGYTPPDTISGAIIGTAFGILSGQGETAGIAIAVPIAVATQQLDVLAKTLDVYFVKKADNDAKNGDYSKIGFYHYSSLVLITLFKIVPIFLAIMLGGEYVADLFAKVPPIVMQGLNSAGALLPSIGFGMLLNMMLKKNMWVFLLIGFICSVYGGMSTIGISLVGIAVAYFYDMIGSKPQETTSSSDVEEDLDL

SEQ ID NO: 4539 - DNA, 468 bp, Streptococcus pneumoniae
atgtctatagagtttgttcgtattgatgaccgtctggtacatggtcaagttgtcactacgtggctaaaaaagtatgatattgagcaagttatcattgttaatgatcgcatctcagaagataaaacacgacaatctattttaaagatttctgcaccggtaggtttaaaaattgttttctttagtgtaaaacggtttgtggaagttttaaactctgtgccaataaaaaagagaacaatgctgatatatacaaatccaaaagatgtgtatgattctattgaaggaaatttaaaattggagtacctcaatgtaggacagatgagtaaaacggaggaaaatgaaaaggtaacgggaggtgtagctctaggtgaagaagacaaatattattttaagaaaatagttgataagggaacgagagttgaaattcaaatggttcctaatgataaagttacaatgttggaaaaattttta

SEQ ID NO: 4540 - protein, 156 aa, Streptococcus pneumoniae
  PTS system, IIB component; Cellular location: membrane; Similar to strain R6 sequence 15904010 (1.E-84)
MSIEFVRIDDRLVHGQVVTTWLKKYDIEQVIIVNDRISEDKTRQSILKISAPVGLKIVFFSVKRFVEVLNSVPIKKRTMLIYTNPKDVYDSIEGNLKLEYLNVGQMSKTEENEKVTGGVALGEEDKYYFKKIVDKGTRVEIQMVPNDKVTMLEKFL

SEQ ID NO: 4541 - DNA, 444 bp, Streptococcus pneumoniae
ttgttgaaagagaaaatgttcaatagaggaattttagttgccagtcatggtaattttgctagcggagctctcatgaccgcagaaatgtttgttggtgagacaacaaatgatagagttaggacattaggtttgatgcctggagagaatattgtagagtttgagcattattttaaaaatcaagtggatgaactgttagactcaaatcaagaggttatcgttttgactgacttgattggaggaagtcctaataatgtggctttgtcacggtttttaaatttggattcagttgatattgtaacagggtttaatatccctctcctagtggaattaatatcaagttatgattcaaaaatcaatttagaagaaattgttcacaatgctcaaaatagtttgtttaatgttaaacaacaacttaacgtagaggaggaagaagatttatgtcta

SEQ ID NO: 4542 - protein, 148 aa, Streptococcus pneumoniae
  PTS system, IIA component; Cellular location: cytoplasm; Similar to strain R6 sequence 15904011 (3.E-77)
MLKEKMFNRGILVASHGNFASGALMTAEMFVGETTNDRVRTLGLMPGENIVEFEHYFKNQVDELLDSNQEVIVLTDLIGGSPNNVALSRFLNLDSVDIVTGFNIPLLVELISSYDSKINLEEIVHNAQNSLFNVKQQLNVEEEEDLCL

SEQ ID NO: 4543 - DNA, 441 bp, Streptococcus pneumoniae
atgttaaaacatataccgaaaaatatttctccagatttattgaagactttaatggaaatgggacatggagatgaaatagtattagctgacgcgaattatccttctgcctcatgtgcaaataagctaattcgttgtgatggtgtaaatattccagaattattagattccattctgtatttaatgccattagatagttacgtcgatagttcaattcagtttatgaacgttgtttcgggtgatgatattcctaagatatggggtacctatagacagatgattgaaggtcatggtacagatcttaaaacgattacttatcttagaagagaagacttttatgaacgtagtaagaaagcttatgctattgttgctacaggagaaacttcactttatgctaatattatccttaagaaaggagtagttgttgaaagagaaaatgttcaa

SEQ ID NO: 4544 - protein, 147 aa, Streptococcus pneumoniae
  fucose operon FucU protein (fucU); Cellular location: cytoplasm; Similar to strain R6 sequence 15904012 (1.E-81)
MLKHIPKNISPDLLKTLMEMGHGDEIVLADANYPSASCANKLIRCDGVNIPELLDSILYLMPLDSYVDSSIQFMNVVSGDDIPKIWGTYRQMIEGHGTDLKTITYLRREDFYERSKKAYAIVATGETSLYANIILKKGVVVERENVQ

SEQ ID NO: 4545 - DNA, 636 bp, Streptococcus pneumoniae
atgtcagatgtaaaacaagaattaattaaatatggtaagaagctagtagaaacagatttgacgaaaggaacaggtgggaatctcagcgttttcgatcgtgaaaaacaattgatggcaattaccccgtcgggtattgatttctttgaaatcaaagaatccgatattgtagtgatggatattaatggaaatgttgtagagggagaacgcttgccatctagcgaatggtatatgcatttgattcaatatcaaactcgtgatgatatcgatgcaattatccatgctcatacaacttatgcaacagtattagcttgtctcagagaaccacttccagcgagtcattatatgattgcagtggcagggaaagatgttcgggtagctgagtatgcaacatatggcacgaaagaattggctgtgaatgcagctaaagcaatggaaggtcgtagagcagttttactagcgaatcatggaattttagcaggtgcacaaaatttattgaatgcatttaatattgttgaagaagttgaatattgtgcaaaaatttattgtttagctaagaattttggagagccagtagttcttcctgatgaggagatggaattgatggcagaaaaatttaaaacatacggtcagagaaaa

SEQ ID NO: 4546 - protein, 212 aa, Streptococcus pneumoniae
  L-fuculose phosphate aldolase (fucA); Cellular location: cytoplasm; Similar to strain R6 sequence 15904013 (e-120)
MSDVKQELIKYGKKLVETDLTKGTGGNLSVFDREKQLMAITPSGIDFFEIKESDIVVMDINGNVVEGERLPSSEWYMHLIQYQTRDDIDAIIHAHTTYATVLACLREPLPASHYMIAVAGKDVRVAEYATYGTKELAVNAAKAMEGRRAVLLANHGILAGAQNLLNAFNIVEEVEYCAKIYCLAKNFGEPVVLPDEEMELMAEKFKTYGQRK

SEQ ID NO: 4547 - DNA, 1401 bp, Streptococcus pneumoniae
atggaagcggttttagcaatagatttaggtgcgacttctggaagagcaatcgttggttacctttctgaaaataaactagtaatggaagaaataaatcgcttttctaatctacctattagagtaaaagggcatttatcttgggatattgactttctactagctaaaattcttgaaagtatccgcttggctaatactagttacaagattttatctatcggtattgacacatggggagttgattttggactgattgataatgaaggtaagctgttattacaacctgttcattatcgtgatgaaagaacaaagggagtgttaaaggaaatatctgaaatgactgaattagaaaaactgtattcagagacaggaaatcagattatggagataaataccttgtttcaactctttaaggcacgtcaagaatctcctgactctttctataagaccaataagattcttttaatgccagatttgtttaattatctcttgacaggtaagtttgctacagaaaaaagcattgcttcaacaactcaattatttgatcctaggagtcaaaattggaatcagaatatcttaaaactatttgaattggattcatctttacttcctgaaattgtttcagagggaaatgttcttggaaggataaaagaggagtatggtttaggcgatattcctgttgtgaatgtttgtagtcatgatacagcaagcgcgattgtctcagtacctaagacagaaggtagtttatttatttcatcaggtacttggtctttggttggagtggaacttacttcaccgattcttactaccgaatccttcagttatggatttacaaatgaagtcggtaaagatggagtgattacatttctgaagaattgtacagggttgtggatcatagaggaactaagacgttcatttgaacgaagagggaaagcctattcttttgatgatattaggacaatggtggagaaagaaaaagaaaatcttcctctgattgatactgaatcaactgaatttgcaacagaatctgatatgcacaagactttgacagaatatctagcttatcatcatgaaactagagagtggacagatggacaactatttaagattgtttatgaaagcctagctgaaacgtataggaaagcgatagagttactagaagaactaactcataaggtttataagaggatatatgtgattggaggaggtgctagagccagttactttaaccaaatgattgctgatagaactggtaaagaggttcttacaggtttgactgaggctacagctgtggggaatattgttgtgcagctcatagctatgggacaattaaaagggatggaagaggctcaccatgttattgaggagtttctacaattagagagttattactcccaaaagaat

SEQ ID NO: 4548 - protein, 467 aa, Streptococcus pneumoniae
  L-fuculose kinase fucK, putative; Cellular location: cytoplasm; Similar to strain R6 sequence 15904014 (0.E+01)
MEAVLAIDLGATSGRAIVGYLSENKLVMEEINRFSNLPIRVKGHLSWDIDFLLAKILESIRLANTSYKILSIGIDTWGVDFGLIDNEGKLLLQPVHYRDERTKGVLKEISEMTELEKLYSETGNQIMEINTLFQLFKARQESPDSFYKTNKILLMPDLFNYLLTGKFATEKSIASTTQLFDPRSQNWNQNILKLFELDSSLLPEIVSEGNVLGRIKEEYGLGDIPVVNVCSHDTASAIVSVPKTEGSLFISSGTWSLVGVELTSPILTTESFSYGFTNEVGKDGVITFLKNCTGLWIIEELRRSFERRGKAYSFDDIRTMVEKEKENLPLIDTESTEFATESDMHKTLTEYLAYHHETREWTDGQLFKIVYESLAETYRKAIELLEELTHKVYKRIYVIGGGARASYFNQMIADRTGKEVLTGLTEATAVGNIVVQLIAMGQLKGMEEAHHVIEEFLQLESYYSQKN

SEQ ID NO: 4549 - DNA, 771 bp, Streptococcus pneumoniae
atgataaaagatgaacgtgtacttgaattgattgaaattatcaaaaagaaaaaaagaattgccgtaaaagagctggcagaaatcactttctccagcacaagtaccttacgtcgtgatttaattttcttagaaaatcaaggtcttatcaaaagaaagcacggatacgtgaccctgtcctctatgaacacaattgaactttctcatcaaatacgtgaaggagaaagtactaggcaaaaaagactaatcgctagtctcgctaaagactttattcggtctggtatgtgtatctatctagattctagtactactgtctacgaactctgtccctatctttctgaacttgataatttgattatttttacaaatggtttacatactgcacaaaccctatctgaaactgttaaagatagctccaaaatctttatcacatctggcgaggtcaaacatcaatcctgttccgtggtcaactatgataaggaaaattctttattagatcattttaatatcgatttagcattttgttcagcaagaggtattgatgaccaatatgtttatgaagcttctctcagccaagctatttcaaaaaagaatattattgacaaagcccatgaaaccatcttactgattgatagttctaaattttacaagactggattttttaaaattaatcccctctccaaatacacaacctttatttcagacaccgtgccagatcaaaaattattagacgcagtcgaattatttgatggagaatgggtttctgatattcaa

SEQ ID NO: 4550 - protein, 257 aa, Streptococcus pneumoniae
  fucose operon repressor, putative; Cellular location: cytoplasm; Similar to strain R6 sequence 15904015 (e-143)
MIKDERVLELIEIIKKKKRIAVKELAEITFSSTSTLRRDLIFLENQGLIKRKHGYVTLSSMNTIELSHQIREGESTRQKRLIASLAKDFIRSGMCIYLDSSTTVYELCPYLSELDNLIIFTNGLHTAQTLSETVKDSSKIFITSGEVKHQSCSVVNYDKENSLLDHFNIDLAFCSARGIDDQYVYEASLSQAISKKNIIDKAHETILLIDSSKFYKTGFFKINPLSKYTTFISDTVPDQKLLDAVELFDGEWVSDIQ

SEQ ID NO: 4551 - DNA, 1503 bp, Streptococcus pneumoniae
gtgaaaaaaattagcttattactagccagtctatgtgccttgtttttagtggcttgttccaatcaaaaacaggcagatggtaaactcaatatcgtgacaaccttttaccctgtctatgaatttaccaagcaagtcgcaggagatacggctaatgtagaactcctaatcggtgctgggacagaacctcatgaatacgaaccatctgccaaggcagttgccaaaatccaagatgcagataccttcgtttatgaaaatgaaaacatggaaacatgggtacctaaattgctagataccttggataagaaaaaagtgaaaaccatcaaggcgacaggcgatatgttgctcttgccaggtggcgaggaagaagagggagaccatgaccatggagaagaaggtcatcaccatgagtttgacccccatgtttggttatcaccagttcgtgccattaaactagtagagcacatccgcgacagcttgtcagcagattatcctgataaaaaagagacctttgagaagaatgcagctgcctatatcgaaaaattgcaagccttggataaggcttacgcagaaggtttgtctcaagcaaaacaaaagagctttgtgactcaacacgcagcctttaactatcttgccttggactatggactcaaacaagtcgcaatctcaggactttctccagatgcagagccatcagctgctcgcttggcagaattgacagagtatgtcaagaaaaataaaatcgcctatatctattttgaagaaaatgcctcacaagcccttgctaacacactttcaaaagaagcaggtgtcaaaactgatgtcctcaatcctttagaaagtctgacagaagaggacaccaaggctggagaaaactacatttccgtgatggagaaaaacctcaaggctttgaaacaaacaacagaccaagaaggcccagcaattgaacctgaaaaggcagaggataccaagacagtccaaaatggttacttcgaggatgcagctgtcaaggaccgcaccttgagtgactatgcaggtaactggcaatcagtttatcctttccttgaagacggcacgtttgaccaagtctttgactacaaggctaagttgactggtaagatgacccaggctgagtacaaggcttactatacaaaaggctatcatacagatgtgactaagattaacattactgataatactatggaatttgttcaaggtggacaaagcaagaaatacacttacaagtatgtcggtaagaaaattttgacttacaagaaaggcaatcgtggcgtgcgtttcctctttgaagccacagatgctgacgctggacaattcaagtatgttcagtttagtgaccacaatgttgccccagttaaggcagaacatttccatatcttctttggaggcacaagccaagaagccctctttgaagaaatggacaactggccaacctactacccagataacctatctggccaagaaatcgcccaagaaatgttggcgcat

SEQ ID NO: 4552 - protein, 501 aa, Streptococcus pneumoniae
  zinc ABC transporter, zinc-binding adhesion liprotein (adcA); Cellular location: lipoprotein; Similar to strain R6 sequence 15904016 (0.E+01)
MKKISLLLASLCALFLVACSNQKQADGKLNIVTTFYPVYEFTKQVAGDTANVELLIGAGTEPHEYEPSAKAVAKIQDADTFVYENENMETWVPKLLDTLDKKKVKTIKATGDMLLLPGGEEEEGDHDHGEEGHHHEFDPHVWLSPVRAIKLVEHIRDSLSADYPDKKETFEKNAAAYIEKLQALDKAYAEGLSQAKQKSFVTQHAAFNYLALDYGLKQVAISGLSPDAEPSAARLAELTEYVKKNKIAYIYFEENASQALANTLSKEAGVKTDVLNPLESLTEEDTKAGENYISVMEKNLKALKQTTDQEGPAIEPEKAEDTKTVQNGYFEDAAVKDRTLSDYAGNWQSVYPFLEDGTFDQVFDYKAKLTGKMTQAEYKAYYTKGYHTDVTKINITDNTMEFVQGGQSKKYTYKYVGKKILTYKKGNRGVRFLFEATDADAGQFKYVQFSDHNVAPVKAEHFHIFFGGTSQEALFEEMDNWPTYYPDNLSGQEIAQEMLAH

SEQ ID NO: 4553 - DNA, 804 bp, Streptococcus pneumoniae
atgcttagtttattatcttacgactttatacaacgcgcctttttggcggttattgctatgagtcttttctcaccggtattgggaaccttcctcatcttgcgtcgtcagagtttgatgagtgatacccttagccacgtctcactttcaggtgtagcctttggtctggttttggggatttctccaactgtttctactattgccattgtcttgattgcggcggtctttctggagtatctccgtacggtttacaagagctttatggaaatcgggacagctatcctcatgtcaacaggtctggctgtttctctgattgtcatgagcaagggtaaaagctcgagttcaatgagtttggaccaatatctctttggttcgatcgtgactatcagtgaagaacaggtcatttccctctttgtcattgcggcggttgttttgattttgacctttctctttcttcgtcctatgtatatcttaacttttgacgaagatacggcctttgtggatggcttgccagttcgtaccatgtccattctttttaacatggtgacaggggtggctattgcccttatgattcctgcagcaggagctcttctggtatcgaccattatggtcttgccagctagtattgccctgcgtctggggaaaaactttaaatcggttatgctgcttgccagtgcgattggctttttgggaatggtagcaggactttacatttcctactatgcagaaacacctgcaagtgcaagtattaccattatttttgtaactgtctttatactaatcagtttagtaagacgttttatcaaa

SEQ ID NO: 4554 - protein, 268 aa, Streptococcus pneumoniae
  zinc ABC transporter, permease protein (adcB); Cellular location: membrane; Similar to strain R6 sequence 15904017 (e-140)
MLSLLSYDFIQRAFLAVIAMSLFSPVLGTFLILRRQSLMSDTLSHVSLSGVAFGLVLGISPTVSTIAIVLIAAVFLEYLRTVYKSFMEIGTAILMSTGLAVSLIVMSKGKSSSSMSLDQYLFGSIVTISEEQVISLFVIAAVVLILTFLFLRPMYILTFDEDTAFVDGLPVRTMSILFNMVTGVAIALMIPAAGALLVSTIMVLPASIALRLGKNFKSVMLLASAIGFLGMVAGLYISYYAETPASASITIIFVTVFILISLVRRFIK

SEQ ID NO: 4555 - DNA, 702 bp, Streptococcus pneumoniae
atgagatatattacggtagaggatttgtccttctattatgataaggagcctgttcttgaacatatcaattattgtgttgatagtggggaatttgttaccttgactggggaaaatggagcggctaagacgacgctcatcaaggctagtcttggaattctgcaaccacgcattggaaaggtggctatttcaaagacaaatacgcaaggtaagaaattgagaatagcctatcttcctcaacaaattgccagttttaatgctggttttccaagtacggtctatgaatttgtcaagtcgggtcgctatccgagaaaaggctggttccgtcgtttgaatgctcatgatgaggagcatatcaaggctagtctggactcagttggcatgtgggaacatcgagacaaacgcttggggtctctatctgggggacaaaagcagcgagcggtaattgcgcgtatgtttgcttctgaccctgatgtgtttatcctagacgagccgacaacggggatggatgcaggaagtaaaaatgaattttacgaactcatgcaccacagcgcccatcatcatggcaaggctgttttgatgattacccatgaccctgaagaagttaaggattatgcggatcgcaatattcatctagtccgtaaccaagactcgccatggcgttgtttcaatgttcatgagaatggccaggaggtgggccatgct

SEQ ID NO: 4556 - protein, 234 aa, Streptococcus pneumoniae
  zinc ABC transporter, ATP-binding protein (adcC); Cellular location: cytoplasm; Similar to strain R6 sequence 15904018 (e-138)
MRYITVEDLSFYYDKEPVLEHINYCVDSGEFVTLTGENGAAKTTLIKASLGILQPRIGKVAISKTNTQGKKLRIAYLPQQIASFNAGFPSTVYEFVKSGRYPRKGWFRRLNAHDEEHIKASLDSVGMWEHRDKRLGSLSGGQKQRAVIARMFASDPDVFILDEPTTGMDAGSKNEFYELMHHSAHHHGKAVLMITHDPEEVKDYADRNIHLVRNQDSPWRCFNVHENGQEVGHA

SEQ ID NO: 4557 - DNA, 498 bp, Streptococcus pneumoniae
atgtcaaagaatagtatttttctcttaaaaaagagaagtctaaaaggaaaggagtcagatatgagacagctagcaaaggatatcaatgcttttttgaatgaggtgattttgcaggcggaaaatcagcatgaaatcctaataggtcattgcactagcgaggtggccctgaccaatactcaggagcatatccttatgctcttgtcagaggaatctttaacaaattcagaattggcccgtcgtctcaatgtcagtcaggcggcagttaccaaggccattaagtctttggtcaaggaagggatgttggaaacatctaaagattctaaagatgcgcgtgtgattttttatcagttgactgacttggctcgtccaatcgctgaggagcaccaccatcaccatgagcatacacttttaacctatgaacaagtggcgactcagtttactccaaatgaacaaaaagtgattcagcggtttttgactgctttagtaggagaaatcaaa

SEQ ID NO: 4558 - protein, 166 aa, Streptococcus pneumoniae
  adc operon repressor AdcR (adcR); Cellular location: cytoplasm; Similar to strain R6 sequence 15904019 (8.E-79)
MSKNSIFLLKKRSLKGKESDMRQLAKDINAFLNEVILQAENQHEILIGHCTSEVALTNTQEHILMLLSEESLTNSELARRLNVSQAAVTKAIKSLVKEGMLETSKDSKDARVIFYQLTDLARPIAEEHHHHHEHTLLTYEQVATQFTPNEQKVIQRFLTALVGEIK

SEQ ID NO: 4559 - DNA, 1248 bp, Streptococcus pneumoniae
atgatcttcggaccggtcttgatcgctggtttgttggtttttctgctcattttcttttatcctactgagatgcatcataatctaggagctgaaaagcgttcagcagtggctactactatcgatagttttaaggagcgaagtcaaaaagtcagagcactatctgatccaaatgtgcgttttgttcccttctttggctctagtgaatggcttcgttttgacggtgctcatcctgcggtattagctgagaaatacaatcgttcctaccgtccttatcttttaggacaggggggagctgcatcgcttaaccaatattttggaatgcaacagatgttaccacagctggagaataaacaagttgtgtatgttatctcacctcagtggttcagtaaaaatggctatgatccagcagccttccagcagtattttaatggagaccagttgactagttttctgaaacatcaatctggggatcaggctagtcaatatgcagcgactcgcttactgcaacagttcccaaacgtagctatgaaggacctggttcagaagttggcaagtaaagaagaattgtcgacagcagacaatgaaatgattgaattattggctcgttttaatgaacgccaagcttccttttttggtcagttttcggttagaggctatgttaactacgataagcatgtagctaagtatttaaaaatcttgccagaccagttttcttatcaggcaatagaagatgttgtcaaagcagatgctgaaaaaaatacttccaataatgagatgggaatggaaaattatttctataatgagcagatcaagaaggatttgaagaaattaaaggattctcagaaaagctttacctatctcaagtcgccagagtataatgacttgcagttggttttaacacagttttctaaatctaaggtaaacccgatttttatcattccacctgttaataaaaaatggatgaactatgctggtctacgagaggatatgtaccaacaaacggtgcagaagattcgctaccagttagaaagtcaaggttttaccaatatagcagatttttctaaggacggcggggagcctttctttatgaaggacaccattcaccttggttggttgggttggttggcttttgacaaggcagttgatcctttcctatccaatcccacaccagctccgacttaccatctgaatgagcgctttttcagcaaagattgggcgacttatgatggagatgtcaaagaatttcaa

SEQ ID NO: 4560 - protein, 416 aa, Streptococcus pneumoniae
  dltD protein (dltD); Cellular location: outside; Similar to strain R6 sequence 15904020 (0.E+01)
MIFGPVLIAGLLVFLLIFFYPTEMHHNLGAEKRSAVATTIDSFKERSQKVRALSDPNVRFVPFFGSSEWLRFDGAHPAVLAEKYNRSYRPYLLGQGGAASLNQYFGMQQMLPQLENKQVVYVISPQWFSKNGYDPAAFQQYFNGDQLTSFLKHQSGDQASQYAATRLLQQFPNVAMKDLVQKLASKEELSTADNEMIELLARFNERQASFFGQFSVRGYVNYDKHVAKYLKILPDQFSYQAIEDVVKADAEKNTSNNEMGMENYFYNEQIKKDLKKLKDSQKSFTYLKSPEYNDLQLVLTQFSKSKVNPIFIIPPVNKKWMNYAGLREDMYQQTVQKIRYQLESQGFTNIADFSKDGGEPFFMKDTIHLGWLGWLAFDKAVDPFLSNPTPAPTYHLNERFFSKDWATYDGDVKEFQ

SEQ ID NO: 4561 - DNA, 237 bp, Streptococcus pneumoniae
atggatatcaaatcagaagttattgaaattattgatgagttgtttatggaagatgtttctgacatgatggatgaagatctttttgatgcaggtgtcttggatagtatgggaacggttgagttgattgtggagattgagaaccgttttgacattcgtgtccctgtaacagagtttggtcgtgacgactggaatacagctaataaaatcatagctggtattgtggagctacaaaatgct

SEQ ID NO: 4562 - protein, 79 aa, Streptococcus pneumoniae
  D-alanyl carrier protein (dltC); Cellular location: cytoplasm; Similar to strain R6 sequence 15904021 (1.E-40)
MDIKSEVIEIIDELFMEDVSDMMDEDLFDAGVLDSMGTVELIVEIENRFDIRVPVTEFGRDDWNTANKIIAGIVELQNA

SEQ ID NO: 4563 - DNA, 1242 bp, Streptococcus pneumoniae
atgatggagttttttcaacagcttcctcatttagagccatatggcaatcctcagtattttgtttatgtgattgctgcaaccttgcccatctttataggtctctttttcaagaaacgctttgcctggtatgaagtgttggtaagtctcttctttattgtcaccatgttggtgggtggaaagaccaatcaactagctgccttgggtatttacctttgctgggaaatattgctcctgcttttctacaagcattatcgaaaaagcaaggatggcaagtgggtcttctacttagttagttttctgtccctacttccgattatctttgtcaaggtgcaaccagctatcaatggaacgcagtctttgcttgggttcttgggaatttcttacctgacctttcgttcggttggaattgtcatcgagctgagagatggagtgattaaggattttaccctctgggaattcctccgtttccttctcttcatgccaactttctcgagtggtccaatcgatcgctttaagcgatttaatgaaaattatcaggctattcctgagcgagatgagttgatggatatgctggatgaatctgtccgctatatcatgtggggctttttgtataagtttatcctagctcatgttttaggagagaccttactacctcctctgaagaatttagccttgcagtcaggtggcttctttaatctctatgccttggcagttatgtatacttttggtctggaactcttctttgactttgcaggttattctatgtttgctttggccatctcaaacttgatgggaatccgtagccctatcaactttaacaagccctttttatcaagggatttaaaggagttttggaatcgctggcatatgagtctgtccttctggttccgtgactttgtctttatgcgaatggtgatggtgttaaccagaaagaaagtctttaaaaatcgtaatgtaacctcaagcatggcctacattgtaaatatgctgattatgggattttggcatggtgtgacctggtactatatcgcctatggactctttcatggactaggcttggtcatcaatgatgcctgggttcgcaagaaaaaaacgctcaataaggaacggaaaaaagcagggaaggctgccctacctgagaatcgctggattcagttgcttggcatggttgtcactttccatgttgtcatgttgtcattcttaatcttttctggattcttgaataatctatggtttaaaaaa

SEQ ID NO: 4564 - protein, 414 aa, Streptococcus pneumoniae
  dltB protein (dltB); Cellular location: membrane; Similar to strain R6 sequence 15904022 (0.E+01)
MMEFFQQLPHLEPYGNPQYFVYVIAATLPIFIGLFFKKRFAWYEVLVSLFFIVTMLVGGKTNQLAALGIYLCWEILLLLFYKHYRKSKDGKWVFYLVSFLSLLPIIFVKVQPAINGTQSLLGFLGISYLTFRSVGIVIELRDGVIKDFTLWEFLRFLLFMPTFSSGPIDRFKRFNENYQAIPERDELMDMLDESVRYIMWGFLYKFILAHVLGETLLPPLKNLALQSGGFFNLYALAVMYTFGLELFFDFAGYSMFALAISNLMGIRSPINFNKPFLSRDLKEFWNRWHMSLSFWFRDFVFMRMVMVLTRKKVFKNRNVTSSMAYIVNMLIMGFWHGVTWYYIAYGLFHGLGLVINDAWVRKKKTLNKERKKAGKAALPENRWIQLLGMVVTFHVVMLSFLIFSGFLNNLWFKK

SEQ ID NO: 4565 - DNA, 1548 bp, Streptococcus pneumoniae
gtgtcaaataaaccaatagcagatatgattgaaaccattgagcattttgctcagacacagcctagctatcctgtctataatgttttggggcaggaacacacttatggcgatttaaaggctgattcggatagtttggctgcagtcattgaccaactaggcttgcctgagaagtctcctgtggttgtttttggtggccaagaatatgaaatgttggcaacctttgtagcgctgactaagtcaggtcatgcctacattccaattgatagccattcggccttggagcgagtttcagctattttagaagtagcagagccaagcttgattattgccatttcagcctttcccttggagcaggtttctacaccaatgataaatctagctcaggttcaagaagcctttgcccaagggaataactatgaaatcacgcatccagtcaagggagatgataattactacattatctttacttctggtacgactggtaagcctaagggagtgcagatttcacatgataatctcctcagctttacaaactggatgattacggataaggaatttgcgacaccgagtcgtccgcaaatgctggcacagccaccttattcttttgacttgtctgtcatgtattgggcaccgaccttggcacttggtggtacgcttttcactcttccttcagtcatcactcaggactttaagcaactctttgcggctatcttttcattgccaatcgctatctggacatcaacaccatcctttgcagatatggccatgttgtctgaatacttcaacagtgagaaaatgcctggaatcacgcatttctactttgatggtgaagaattgacggtcaaaacagctcaaaaactgcgcgagcgtttcccaaatgcccgtatcatcaatgcttacggcccaacagaagcgacagtagctctgtcagcagttgccgtgacagacgagatgttagcgactctcaaacgcctaccaatcggctataccaaggctgattctccaacctttatcattgacgaggaaggaaataaactgccaaatggtgagcagggagaaatcattgtttctgggccagctgtttcaaaaggttatatgaacaatcctgaaaaaacagcagaagccttctttgagtttgaagatctgccagcctatcacacaggcgatgtgggaaccatgacagatgagggcttgcttctctacggcggacgcatggacttccagattaagtttaacggttaccgcattgagttagaagatgtctctcaaaacctcaacaagtctcgctttatcgaatctgctgtcgcagtaccgcgctataacaaggaccacaaggtacaaaatctattggcttatgtcatcttaaaagacggtgttcgtgagcagtttgagcgagatatcgatattaccaaggccatcaaggaagacctgacagacatcatgatgtcctatatgatgccatctaaattcctttaccgagacagtttgccactaactccaaatggaaagattgacatcaaaggattgattaacgaggtgaataagaga

SEQ ID NO: 4566 - protein, 516 aa, Streptococcus pneumoniae
  D-alanine-activating enzyme (dltA); Cellular location: membrane; Similar to strain R6 sequence 15904023 (0.E+01)
MSNKPIADMIETIEHFAQTQPSYPVYNVLGQEHTYGDLKADSDSLAAVIDQLGLPEKSPVVVFGGQEYEMLATFVALTKSGHAYIPIDSHSALERVSAILEVAEPSLIIAISAFPLEQVSTPMINLAQVQEAFAQGNNYEITHPVKGDDNYYIIFTSGTTGKPKGVQISHDNLLSFTNWMITDKEFATPSRPQMLAQPPYSFDLSVMYWAPTLALGGTLFTLPSVITQDFKQLFAAIFSLPIAIWTSTPSFADMAMLSEYFNSEKMPGITHFYFDGEELTVKTAQKLRERFPNARIINAYGPTEATVALSAVAVTDEMLATLKRLPIGYTKADSPTFIIDEEGNKLPNGEQGEIIVSGPAVSKGYMNNPEKTAEAFFEFEDLPAYHTGDVGTMTDEGLLLYGGRMDFQIKFNGYRIELEDVSQNLNKSRFIESAVAVPRYNKDHKVQNLLAYVILKDGVREQFERDIDITKAIKEDLTDIMMSYMMPSKFLYRDSLPLTPNGKIDIKGLINEVNKR

SEQ ID NO: 4567 - DNA, 132 bp, Streptococcus pneumoniae
ttgatgaaacagagaaaagaattgtacctctttcttggtcggacagccttgtattttcttatctttctagggctgctttacttctttagctatcttggtcagggtcaaggaagctttatctataatgaattt

SEQ ID NO: 4568 - protein, 44 aa, Streptococcus pneumoniae
  hypothetical protein; Cellular location: membrane
MMKQRKELYLFLGRTALYFLIFLGLLYFFSYLGQGQGSFIYNEF

SEQ ID NO: 4569 - DNA, 306 bp, Streptococcus pneumoniae
gtgacactgactattctatattttccaaacgcacagatgtttttattattttcagctttagttggtatgttatcgcaactaaaagaagttcctgaaagtgtatttcttcaggaaacagtagaggaaaatcatttagttaatgtctattccgttcttgaagtgatttctacattagcattttcagtatttgttttgctaatgagctatattactgagagttttggtattagcatcagtttttggctatcagccatttgtctgatgatagaagctattttaatttatatcagacgagattattttaaa

SEQ ID NO: 4570 - protein, 102 aa, Streptococcus pneumoniae
  conserved hypothetical protein, interruption; Cellular location: membrane; Similar to strain R6 sequence 15904024 (2.E-51)
MTLTILYFPNAQMFLLFSALVGMLSQLKEVPESVFLQETVEENHLVNVYSVLEVISTLAFSVFVLLMSYITESFGISISFWLSAICLMIEAILIYIRRDYFK

SEQ ID NO: 4571 - DNA, 1344 bp, Streptococcus pneumoniae; identical to SEQ ID NO: 517

SEQ ID NO: 4572 - protein, 448 aa, Streptococcus pneumoniae; identical to SEQ ID NO: 486
  IS1380-Spn1, transposase; Cellular location: cytoplasm; Similar to strain R6 sequence 15903941 (2.E-46)

SEQ ID NO: 4573 - DNA, 384 bp, Streptococcus pneumoniae; identical to SEQ ID NO: 341

SEQ ID NO: 4574 - protein, 128 aa, Streptococcus pneumoniae; identical to SEQ ID NO: 342
  maturase-related protein-related

SEQ ID NO: 4575 - DNA, 447 bp, Streptococcus pneumoniae; identical to SEQ ID NO: 339

SEQ ID NO: 4576 - protein, 149 aa, Streptococcus pneumoniae; identical to SEQ ID NO: 340
  maturase-related protein

SEQ ID NO: 4577 - DNA, 411 bp, Streptococcus pneumoniae; identical to SEQ ID NO: 337

SEQ ID NO: 4578 - protein, 137 aa, Streptococcus pneumoniae; identical to SEQ ID NO: 338
  group II intron, maturase FRAMESHIFT

SEQ ID NO: 4579 - DNA, 585 bp, Streptococcus pneumoniae
ttgtttgtttttgctgatgatagcttatcggcaaactctaaagttgtatctggtgaggctcagtttgagaatggctcatcagtgcggttcggagatacgcaagtaaatattttaagcgatgaagttcttgaggttgtcaatccagatggaagtgtagacactattgaacgacgtgctgacggcgtctatatcaatggggcattttatatggcttatcaaaagaatgaaatcgacctaaatatatcttttagatcatacgatcctaatgtttggaattacgtcaacacaatacatgggaataaacaagctaacacattcgctaacttcatgactggtgctggaatcagttatatgattggtaggataggtgctttattggggggtccatggggtgcaataattggtggagcatattttggtatacaagcttatcagtcttacttggattcacaaagcccatatccatactacataacaagtacttatatccatgttgctcaaagaaaatggaagtttatcactgaatactatagaaactcaaactatactgggtatgtaaaaaccgtaacaacctacgtgaatttc

SEQ ID NO: 4580 - protein, 195 aa, Streptococcus pneumoniae
  hypothetical protein; Cellular location: cytoplasm; Similar to strain R6 sequence 15904024 (e-149)
MFVFADDSLSANSKVVSGEAQFENGSSVRFGDTQVNILSDEVLEVVNPDGSVDTIERRADGVYINGAFYMAYQKNEIDLNISFRSYDPNVWNYVNTIHGNKQANTFANFMTGAGISYMIGRIGALLGGPWGAIIGGAYFGIQAYQSYLDSQSPYPYYITSTYIHVAQRKWKFITEYYRNSNYTGYVKTVTTYVNF

SEQ ID NO: 4581 - DNA, 201 bp, Streptococcus pneumoniae
gtgccgaaatggtcaaatcctgattatgtcaacgaattagacccaaaaatcgttgatatgctagtagaatttcacaagtcacaaggcactttggaaactcccgaggcgcaagcagaaatcgcccaaaaacgtgaagaaatcgagcaaaggagagctgagcttgagggtaaaaaacaagagcttttgaaccgcttgaacaaa

SEQ ID NO: 4582 - protein, 67 aa, Streptococcus pneumoniae
  hypothetical protein FRAMESHIFT; Cellular location: cytoplasm; Similar to strain R6 sequence 15904028 (6.E-35)
MPKWSNPDYVNELDPKIVDMLVEFHKSQGTLETPEAQAEIAQKREEIEQRRAELEGKKQELLNRLNK

SEQ ID NO: 4583 - DNA, 123 bp, Streptococcus pneumoniae
gtgcttgatatgatgcgttttattatgagaagatttacttcattttttgctgaaattgggctcttgcccaagctctatcaacataattgttttctaatactcaatgaaaatcaaagagcaaac

SEQ ID NO: 4584 - protein, 41 aa, Streptococcus pneumoniae
  box element
MLDMMRFIMRRFTSFFAEIGLLPKLYQHNCFLILNENQRAN

SEQ ID NO: 4585 - DNA, 756 bp, Streptococcus pneumoniae
gtggagggcagcattccttgtcgcccgtcccttctttttaatggagacagaaagatgatgaatgaattatttggagaatttctagggactttaatcctgattcttctaggaaatggtgttgttgcaggtgtggttcttcctaaaaccaagagcaatagctcaggttggattgtgattactatgggttgggggattgcagttgcggttgcagtctttgtatctggcaagctcagtccagcttatttaaacccagctgtgaccatcggtgtggccttaaaaggtggtttgccttgggcttccgttttgccttatatcttagcccagttcgcaggggccatgctgggtcagattttggtttggttgcaattcaaacctcactatgaggcagaagaaaatgcaggcaatatcctggcaaccttcagtactggaccagccatcaaggatactgtatcaaacttgattagcgaaatccttggaacttttgttttggtgttgacaatctttgctttgggtctttacgactttcaggcaggtatcggaacctttgcagtgggaactttgattgtcggtatcggtctatcactaggtgggacaacaggttatgccttgaacccagctcgtgaccttggacctcgtatcatgcacagcatcttgccaattccaaacaagggagacggagactggtcttacgcttggattcctgttgtaggccctgttatcggagcagccttggcagtgcttgtattctcacttttc

SEQ ID NO: 4586 - protein, 252 aa, Streptococcus pneumoniae
  glycerol uptake facilitator protein (glpF); Cellular location: membrane; Similar to strain R6 sequence 15904029 (e-132)
MEGSIPCRPSLLFNGDRKMMNELFGEFLGTLILILLGNGVVAGVVLPKTKSNSSGWIVITMGWGIAVAVAVFVSGKLSPAYLNPAVTIGVALKGGLPWASVLPYILAQFAGAMLGQILVWLQFKPHYEAEENAGNILATFSTGPAIKDTVSNLISEILGTFVLVLTIFALGLYDFQAGIGTFAVGTLIVGIGLSLGGTTGYALNPARDLGPRIMHSILPIPNKGDGDWSYAWIPVVGPVIGAALAVLVFSLF

SEQ ID NO: 4587 - DNA, 1824 bp, Streptococcus pneumoniae
atggaattttcaaagaaaacacgtgaattgtcaattaaaaaaatgcaggaacgtaccctggacctcttgattatcggtggaggaatcacaggagctggtgtagccttgcaggcggcagctagcggtcttgagactggtttgattgaaatgcaagactttgcagaaggaacatctagtcgttcaacaaaattggttcacggaggacttcgttacctcaaacaatttgacgtagaagtggtctcagatacggtttctgaacgtgcagtggttcaacaaatcgctccacacattccaaaatcagatccaatgctcttaccagtttacgatgaagatggagcaacctttagcctcttccgtcttaaagtagccatggacttgtacgacctcttggcaggtgttagcaacacaccagctgcgaacaaggttttgagcaaggatcaagtcttggaacgccagccaaacttgaagaaggaaggcttggtaggaggtggagtgtatcttgacttccgtaacaacgatgcgcgtctcgtgattgaaaacatcaaacgtgccaaccaagacggtgccctcattgccaaccacgtgaaggcagaaggcttcctctttgacgaaagtggcaagattacaggtgttgtagctcgtgatctcttgacagaccaagtgtttgaaatcaaggcccgtctggttattaatacaacaggtccttggagtgataaagtacgtaatttgtctaataagggaacgcaattctcacaaatgcgcccaactaagggagttcacttggtagtagattcaagcaaaatcaaggtttcacagccagtttacttcgacacaggtttgggtgacggtcgtatggtctttgttctcccacgtgaaaacaagacttactttggtacaactgatacagactacacaggtgatttggagcatccaaaagtaactcaagaagatgtagattatctacttggcattgtcaacaaccgcttcccagaatccaacatcaccattgatgatatcgaaagcagctgggcaggtcttcgtccattgattgcagggaacagtgcctctgactataatggtggaaataacggtaccatcagtgatgaaagctttgacaacttgattgcgactgttgaatcttatctctccaaagaaaaaacacgtgaagatgttgagtctgctgtcagcaagcttgaaagtagcacatctgagaaacatttggatccatctgcagtttctcgtgggtctagcttggaccgtgatgacaatggtctcttgactcttgctggtggtaaaatcacagactaccgtaagatggctgaaggagctatggagcgcgtggttgacatcctcaaagcagaatttgaccgtagctttaaattgatcaattctaaaacttaccctgtttcaggtggagaattgaacccagcaaatgtggattcagaaatcgaagcctttgcgcaacttggagtatcacgtggtttggatagcaaggaagctcactatctggcaaatctttacggttcaaatgcaccgaaagtctttgcacttgctcacagcttggaacaagcgccaggactcagcttggcagatactttgtcccttcactatgcaatgcgcaatgagttgactcttagcccagttgacttccttcttcgtcgtaccaatcacatgctctttatgcgtgatagcttggatagtatcgttgagccaattttggatgaaatgggacgattctatgactggacagaagaagaaaaagcaacttaccgtgctgatgtcgaagcagctctcgctaacaacgatttagcagaattaaaaaat

SEQ ID NO: 4588 - protein, 608 aa, Streptococcus pneumoniae
  hypothetical protein (Glycerol-3-phosphate dehydrogenase); Cellular location: outside; Similar to strain R6 sequence 15904031 (0.E+01)
MEFSKKTRELSIKKMQERTLDLLIIGGGITGAGVALQAAASGLETGLIEMQDFAEGTSSRSTKLVHGGLRYLKQFDVEVVSDTVSERAVVQQIAPHIPKSDPMLLPVYDEDGATFSLFRLKVAMDLYDLLAGVSNTPAANKVLSKDQVLERQPNLKKEGLVGGGVYLDFRNNDARLVIENIKRANQDGALIANHVKAEGFLFDESGKITGVVARDLLTDQVFEIKARLVINTTGPWSDKVRNLSNKGTQFSQMRPTKGVHLVVDSSKIKVSQPVYFDTGLGDGRMVFVLPRENKTYFGTTDTDYTGDLEHPKVTQEDVDYLLGIVNNRFPESNITIDDIESSWAGLRPLIAGNSASDYNGGNNGTISDESFDNLIATVESYLSKEKTREDVESAVSKLESSTSEKHLDPSAVSRGSSLDRDDNGLLTLAGGKITDYRKMAEGAMERVVDILKAEFDRSFKLINSKTYPVSGGELNPANVDSEIEAFAQLGVSRGLDSKEAHYLANLYGSNAPKVFALAHSLEQAPGLSLADTLSLHYAMRNELTLSPVDFLLRRTNHMLFMRDSLDSIVEPILDEMGRFYDWTEEEKATYRADVEAALANNDLAELKN

SEQ ID NO: 4589 - DNA, 1506 bp, Streptococcus pneumoniae
atgtcacaagaaaaatacatcatggccattgaccagggaactacaagttctcgtgccatcattttcaacaaaaaaggggaaaaggttagctcgagtcaaaaagagtttacccagattttccctcaggcaggttgggttgagcacaatgccaatgaaatttggaactctgttcagtcagttattgcgggtgctttcatcgaaagtggtgtcaagccaaatcaaatcgaggcaatcgggattaccaaccaacgtgaaacaacggttgtctgggataagaaaacaggacttcctatctacaatgctatcgtttggcagtcacgccagacagcacctttggctgagcaactaaaaagccaaggttatgtggaaaaattccatgaaaagactggtttgattattgatgcttacttctctgctaccaaggttcgttggattttggatcatgtagaaggtgctcaagagcgagcagaaaaaggggaattgctctttggtactatcgatacttggttggtttggaaattgactgacggtgcggctcacgtgactgactactcaaatgcagctcgtaccatgctttataacattaaagaactcaaatgggatgatgagattttggaaatccttaacattccgaaggctatacttccagaagttcgttctaactccgaaatctacggcaagacagctccattccatttctacggtggagaggtgccaatctcaggtatggctggggaccaacaagcagccctctttggacagttggcttttgagccaggtatggttaagaatacttatggaacaggctctttcatcatcatgaatactggggaagagatgcagttgtctgaaaacaacctcttgacaaccattggttacggaatcaacggtaaggtttattatgccttggaaggttctatcttcatcgcaggaagtgctattcagtggcttcgtgacggtcttcgcatggttgaaaattcaccagaatctgaaaaatacgctcgtgattctcacaacaacgatgaagtttatgtcgttccagcctttacaggtctaggcgctccatactggaaccaaaatgctcgtggttccgtctttggtttgactcgtggaacaagcaaagaagactttatcaaggcgactttgcaatctattgcttatcaagtgcgtgatatcatcgacaccatgcaagtggatactcagaccgccattcaagtactgaaggtggatggtggtgcagccatgaacaacttcctcatgcagttccaggcggatattttaggcattgacattgcacgtgctaaaaacctggaaacaacagctctaggagcggccttcctagcaggtttgtcagtagggtactggaaagacttggacgagttgaaactcttgaacgagacaggagaactctttgagccatctatgaacgaatctcgcaaggaacaactctacaagggctggaagaaggctgtgaaagcaactcaagtctttgcggaagtagacgac

SEQ ID NO: 4590 - protein, 502 aa, Streptococcus pneumoniae
  glycerol kinase (gplK); Cellular location: cytoplasm; Similar to strain R6 sequence 15904032 (0.E+01)
MSQEKYIMAIDQGTTSSRAIIFNKKGEKVSSSQKEFTQIFPQAGWVEHNANEIWNSVQSVIAGAFIESGVKPNQIEAIGITNQRETTVVWDKKTGLPIYNAIVWQSRQTAPLAEQLKSQGYVEKFHEKTGLIIDAYFSATKVRWILDHVEGAQERAEKGELLFGTIDTWLVWKLTDGAAHVTDYSNAARTMLYNIKELKWDDEILEILNIPKAILPEVRSNSEIYGKTAPFHFYGGEVPISGMAGDQQAALFGQLAFEPGMVKNTYGTGSFIIMNTGEEMQLSENNLLTTIGYGINGKVYYALEGSIFIAGSAIQWLRDGLRMVENSPESEKYARDSHNNDEVYVVPAFTGLGAPYWNQNARGSVFGLTRGTSKEDFIKATLQSIAYQVRDIIDTMQVDTQTAIQVLKVDGGAAMNNFLMQFQADILGIDIARAKNLETTALGAAFLAGLSVGYWKDLDELKLLNETGELFEPSMNESRKEQLYKGWKKAVKATQVFAEVDD

SEQ ID NO: 4591 - DNA, 1425 bp, Streptococcus pneumoniae
atgtatttaggagatttgatggagaaagccgagtgtggtcaattttcaatactttcctttctattacaagagtctcagacgaccgtcaaggctgtaatggaagaaacaggattttcaaaagcaaccctaaccaaatatgtcaccctgctcaatgacaaggctttggatagtggcttagagctggctattcactcagaagatgaaaatctgcgtctgtctatcggtgcagctaccaaggggagagatattcggagcttgtttttggagagtgctgttaaataccagattttggtttatcttctctaccaccaacagtttttagcccatcagctggctcaagaattggtgattagcgaggctacgcttggtcgtcacttggctggtttaaatcagattttgtcagaatttgatttatccatccaaaatggccgttggcgaggtccagagcatcagattcactatttctatttctgtcttttccgaaaggtctggtcgagtcaggaatgggaaggtcacatgcagaaaccagagagaaaacaggagattgccaatttagaggaaatctgcggtgcaagtttgtctgcggggcagaaattggacttggttctctgggctcacatcagtcaacaacgtcttcgggtcaatgcttgtcagtttcaagtcatagaagagaaaatgcgagggtattttgacaatatcttttatcttcgtttgctgagaaaggttccgtccttttttgctgggcaacatattccactaggagttgaggatggtgagatgatgatattcttctcttttctcctatctcatcgcattcttcctcttcatactatggagtatattcttggttttggagggcagttggcagatttactgacgcaattgattcaagaaatgaagaaggaggaactattgggggattatacagaggaccatgtcacctatgaactcagtcagctttgtgctcaagtctatctctataagggctatattttacaggatcgctacaagtaccagttagagaatcgtcatccatatttactgatggaacatgattttaaagagacagcagaggagatttttcatgctctacctgcttttcaacaggggacagatttagataagaagattctctgggaatggctccagttaatcgaatatatggctgaaaacggtggccagcatatgcggattggtctggatttgacatctggttttcttgtcttttcaaggatggcagccattttgaaacggtatttggaatacaatcgttttattaccattgaagcttatgaccctagtcggcattatgatttgctggttaccaataacccgattcataagaaggaacagacaccagtctattatttaaaaaatgacttggatatggaggatttggtagcgattcgccagttattattcact

SEQ ID NO: 4592 - protein, 475 aa, Streptococcus pneumoniae
  conserved domain protein; Cellular location: outside; Feature of note: similar to TeNT; Similar to strain R6 sequence 15904033 (0.E+01)
MYLGDLMEKAECGQFSILSFLLQESQTTVKAVMEETGFSKATLTKYVTLLNDKALDSGLELAIHSEDENLRLSIGAATKGRDIRSLFLESAVKYQILVYLLYHQQFLAHQLAQELVISEATLGRHLAGLNQILSEFDLSIQNGRWRGPEHQIHYFYFCLFRKVWSSQEWEGHMQKPERKQEIANLEEICGASLSAGQKLDLVLWAHISQQRLRVNACQFQVIEEKMRGYFDNIFYLRLLRKVPSFFAGQHIPLGVEDGEMMIFFSFLLSHRILPLHTMEYILGFGGQLADLLTQLIQEMKKEELLGDYTEDHVTYELSQLCAQVYLYKGYILQDRYKYQLENRHPYLLMEHDFKETAEEIFHALPAFQQGTDLDKKILWEWLQLIEYMAENGGQHMRIGLDLTSGFLVFSRMAAILKRYLEYNRFITIEAYDPSRHYDLLVTNNPIHKKEQTPVYYLKNDLDMEDLVAIRQLLFT

SEQ ID NO: 4593 - DNA, 870 bp, Streptococcus pneumoniae
atggataaaattattaaaactatatcagaaagcggagcctttcgtgcttttgtccttgatagcactgaaaccgtccgcactgctcaagaaaaacatcaaacccaagctagctcaactgtagcgcttggtcgaactcttatcgctagccagattctcgcagccaatgaaaaaggaaataccaaacttacagttaaggtgttgggatctagctctctaggtgctattatcaccgtcgctgataccaaggggaacgtcaaaggctatgttcaaaatcctggtgttgacatcaaaaagactgcgactggtgaagtcctagtcggaccttttgttggaaatggtcaattcctcgttatcacagactacggtactggaaatccttacaactctataactcccctcatctctggagaaatcggtgaagaccttgccttttaccttactgaaagccaacaaacgccttcagcggtcggcctcaatgtccttttggacgaggaagacaaggtcaaggttgcaggtggtttcctagttcaagtcttgccaggagccaagaaagaagagattgctcgctttgaaaaacgcatccaagaaatgccagctatctctactcttctcgaaagcgacgaccatatcgaagccctcctcaaggctatctacggggacgaagcctacaagcgtctttctgaagaagaaatccgtttccaatgtgactgtagccatgaacgctttatgaacgctcttgccagccttccaagctcagacttacaggaaatgaaagaggaagaccacggggcagaaatcacttgtcaattctgccaaactacttacaactttgatgaaaaggacctggaggaactcattcgtgacaaatct

SEQ ID NO: 4594 - protein, 290 aa, Streptococcus pneumoniae
  chaperonin, 33 kDa (hslO); Cellular location: cytoplasm; Similar to strain R6 sequence 15904034 (e-163)
MDKIIKTISESGAFRAFVLDSTETVRTAQEKHQTQASSTVALGRTLIASQILAANEKGNTKLTVKVLGSSSLGAIITVADTKGNVKGYVQNPGVDIKKTATGEVLVGPFVGNGQFLVITDYGTGNPYNSITPLISGEIGEDLAFYLTESQQTPSAVGLNVLLDEEDKVKVAGGFLVQVLPGAKKEEIARFEKRIQEMPAISTLLESDDHIEALLKAIYGDEAYKRLSEEEIRFQCDCSHERFMNALASLPSSDLQEMKEEDHGAEITCQFCQTTYNFDEKDLEELIRDKS

SEQ ID NO: 4595 - DNA, 1008 bp, Streptococcus pneumoniae
ttgatgaaaaggacctggaggaactcattcgtgacaaatcttaatacaccttttatgattggcaatattgagattcccaatcgtaccgttttagcgcctatggctggcgtgaccaactcagcctttcgtactatcgcaaaggagctcggagctggactcgttgtaatggaaatggtctctgacaagggaatccaatacaacaacgaaaaaaccctgcacatgcttcatatcgatgagggcgaaaaccctgtctctatccaactttttggtagcgatgaagacagcctagcacgcgcagcagaattcatccaagaaaacaccaagaccgatatcgtcgatatcaacatgggctgccctgtcaacaaaatcgtgaagaacgaagctggtgctatgtggctcaaggatccagacaagatttactccatcatcaacaaggtccagtctgtccttgatatcccacttactgtcaaaatgcgtaccggctgggcggacccatctcttgcagtagaaaatgctctcgctgctgaagctgcaggtgtttctgccctcgccatgcatggccgtacccgtgaacaaatgtatactggccacgcagaccttgagaccctttacaaggttgcccaagctctaaccaagattccattcatcgccaacggtgatatccgtactgtccaagaagccaagcaacgcatcgaagaagttggtgctgacgcagtcatgattggccgagctgccatgggaaatccttacctcttcaaccaaatcaaccattactttgaaacaggagaaatcctacctgatttgacctttgaagacaagatgaagatcgcctacgaacacttgaaacgattgattaacctcaaaggagaaaacgtcgcagttcgtgaattccgcggtctcgctcctcactatctccgtggaacatctggcgctgccaaactccgtggagccatttcgcaagccagcaccctggcagagattgaaaccctcttgcaattggagaaggct

SEQ ID NO: 4596 - protein, 336 aa, Streptococcus pneumoniae
  TIM-barrel protein, putative, NifR3 family; Similar to strain R6 sequence 15904035 (e-179)
MMKRTWRNSFVTNLNTPFMIGNIEIPNRTVLAPMAGVTNSAFRTIAKELGAGLVVMEMVSDKGIQYNNEKTLHMLHIDEGENPVSIQLFGSDEDSLARAAEFIQENTKTDIVDINMGCPVNKIVKNEAGAMWLKDPDKIYSIINKVQSVLDIPLTVKMRTGWADPSLAVENALAAEAAGVSALAMHGRTREQMYTGHADLETLYKVAQALTKIPFIANGDIRTVQEAKQRIEEVGADAVMIGRAAMGNPYLFNQINHYFETGEILPDLTFEDKMKIAYEHLKRLINLKGENVAVREFRGLAPHYLRGTSGAAKLRGAISQASTLAEIETLLQLEKA

SEQ ID NO: 4597 - DNA, 2079 bp, Streptococcus pneumoniae
atgtttgcatcaaaaagcgaaagaaaagtacattattcaattcgtaaatttagtgttggagtagctagtgtagttgttgccagtcttgttatgggaagtgtggttcatgcgacagagaacgagggagctacccaagtacccacttcttctaatagggcaaatgaaagtcaggcagaacaaggagaacaacctaaaaaactcgattcagaacgagataaggcaaggaaagaggtcgaggaatatgtaaaaaaaatagtgggtgagagctatgcaaaatcaactaaaaagcgacatacaattactgtagctctagttaacgagttgaacaacattaagaacgagtatttgaataaaatagttgaatcaacctcagaaagccaactacagatactgatgatggagagtcgatcaaaagtagatgaagctgtgtctaagtttgaaaaggactcatcttcttcgtcaagttcagactcttccactaaaccggaagcttcagatacagcgaagccaaacaagccgacagaaccaggagaaaaggtagcagaagctaagaagaaggttgaagaagctgagaaaaaagccaaggatcaaaaagaagaagatcgtcgtaactacccaaccattacttacaaaacgcttgaacttgaaattgctgagtccgatgtggaagttaaaaaagcggagcttgaactagtaaaagtgaaagctaacgaacctcgagacgagcaaaaaattaagcaagcagaagcggaagttgagagtaaacaagctgaggctacaaggttaaaaaaaatcaagacagatcgtgaagaagcagaagaagaagctaaacgaagagcagatgctaaagagcaaggtaaaccaaaggggcgggcaaaacgaggagttcctggagagctagcaacacctgataaaaaagaaaatgatgcgaagtcttcagattctagcgtaggtgaagaaactcttccaagcccatccctgaaaccagaaaaaaaggtagcagaagctgagaagaaggttgaagaagctaagaaaaaagccgaggatcaaaaagaagaagatcgccgtaactacccaaccaatacttacaaaacgcttgaacttgaaattgctgagtccgatgtggaagttaaaaaagcggagcttgaactagtaaaagaggaagctaaggaacctcgaaacgaggaaaaagttaagcaagcaaaagcggaagttgagagtaaaaaagctgaggctacaaggttagaaaaaatcaagacagatcgtaaaaaagcagaagaagaagctaaacgaaaagcagcagaagaagataaagttaaagaaaaaccagctgaacaaccacaaccagcgccggctccaaaagcagaaaaaccagctccagctccaaaaccagagaatccagctgaacaaccaaaagcagaaaaaccagctgatcaacaagctgaagaagactatgctcgtagatcagaagaagaatataatcgcttgactcaacagcaaccgccaaaaactgaaaaaccagcacaaccatctactccaaaaacaggctggaaacaagaaaacggtatgtggtacttctacaatactgatggttcaatggcgacaggatggctccaaaacaatggctcatggtactacctcaacagcaatggcgctatggcgacaggatggctccaaaacaatggttcatggtactatctaaacgctaatggttcaatggcaacaggatggctccaaaacaatggttcatggtactacctaaacgctaatggttcaatggcgacaggatggctccaatacaatggctcatggtactacctaaacgctaatggttcaatggcgacaggatggctccaatacaatggctcatggtactacctaaacgctaatggtgatatggcgacaggttgggtgaaagatggagatacctggtactatcttgaagcatcaggtgctatgaaagcaagccaatggttcaaagtatcagataaatggtactatgtcaatggctcaggtgcccttgcagtcaacacaactgtagatggctatggagtcaatgccaatggtgaatgggtaaac

SEQ ID NO: 4598 - protein, 693 aa, Streptococcus pneumoniae
  choline binding protein A (cbpA); Cellular location: outside; Feature of note: WYY motif; Similar to strain R6 sequence 15904036 (0.E+01)
MFASKSERKVHYSIRKFSVGVASVVVASLVMGSVVHATENEGATQVPTSSNRANESQAEQGEQPKKLDSERDKARKEVEEYVKKIVGESYAKSTKKRHTITVALVNELNNIKNEYLNKIVESTSESQLQILMMESRSKVDEAVSKFEKDSSSSSSSDSSTKPEASDTAKPNKPTEPGEKVAEAKKKVEEAEKKAKDQKEEDRRNYPTITYKTLELEIAESDVEVKKAELELVKVKANEPRDEQKIKQAEAEVESKQAEATRLKKIKTDREEAEEEAKRRADAKEQGKPKGRAKRGVPGELATPDKKENDAKSSDSSVGEETLPSPSLKPEKKVAEAEKKVEEAKKKAEDQKEEDRRNYPTNTYKTLELEIAESDVEVKKAELELVKEEAKEPRNEEKVKQAKAEVESKKAEATRLEKIKTDRKKAEEEAKRKAAEEDKVKEKPAEQPQPAPAPKAEKPAPAPKPENPAEQPKAEKPADQQAEEDYARRSEEEYNRLTQQQPPKTEKPAQPSTPKTGWKQENGMWYFYNTDGSMATGWLQNNGSWYYLNSNGAMATGWLQNNGSWYYLNANGSMATGWLQNNGSWYYLNANGSMATGWLQYNGSWYYLNANGSMATGWLQYNGSWYYLNANGDMATGWVKDGDTWYYLEASGAMKASQWFKVSDKWYYVNGSGALAVNTTVDGYGVNANGEWVN

SEQ ID NO: 4599 - DNA, 525 bp, Streptococcus pneumoniae
atggtattagcgattattttagtaacattctttattcgattgatttttttaaagcgttcgatagagaatgagaaacgaatccttagcaatggcgggaaagaatttggagttgagaatacaaaacgattaactatggctcatattgttttttatctctcttgcttggttgaggcaatggtgcacaagacaatttttgatggcatgggcatggttggtttagtcttgcttattttttctatgctgatgttgatgttggtgattcacttgttgggagatatttggacagtgaagcttatgcttgtcaataatcacaaatatgtagatcatatcttgtttaggacagtaaaacaccctaattactttttaaatattcttcctgagttgattggcttgaccttgttgagtcatgcttatgtgacttttgttttagtttttccagtttatgcagttattttgtatcgacgaatagctgaagaggaaaagctattacatgaagttataatcccaaatggaagcataaagaga

SEQ ID NO: 4600 - protein, 175 aa, Streptococcus pneumoniae
  conserved hypothetical protein; Cellular location: membrane; Similar to strain R6 sequence 15904037 (2.E-96)
MVLAIILVTFFIRLIFLKRSIENEKRILSNGGKEFGVENTKRLTMAHIVFYLSCLVEAMVHKTIFDGMGMVGLVLLIFSMLMLMLVIHLLGDIWTVKLMLVNNHKYVDHILFRTVKHPNYFLNILPELIGLTLLSHAYVTFVLVFPVYAVILYRRIAEEEKLLHEVIIPNGSIKR

SEQ ID NO: 4601 - DNA, 1329 bp, Streptococcus pneumoniae
atgataaaaaatcctaaattattaaccaagtcttttttaagaagttttgcaattctaggtggtgttggtctagtcattcatatagctatttatttgacctttcctttttattatattcaactggagggggaaaagtttaatgagagcgcaagagtgtttacggagtatttaaagactaagacatctgatgaaattccaagcttactccagtcttattcaaagtccttgaccatatctgctcaccttaaaagagatattgtagataagcggctccctcttgtgcatgacttggatattaaagatggaaagctatcaaattatatcgtgatgttagatatgtctgttagtacagcagatggtaaacaggtaaccgtgcaatttgttcacggggtggatgtctacaaagaagcaaagaatattttgcttttgtatctcccatatacatttttggttacaattgctttttcctttgttttttcttatttttatactaaacgcttgctcaatcctcttttttacatttcagaagtgactagtaaaatgcaagatttggatgacaatattcgttttgatgaaagtaggaaagatgaagttggtgaagttggaaaacagattaatggtatgtatgagcacttgttgaaggttatttatgagttggaaagtcgtaatgagcaaattgtaaaattgcaaaatcaaaaggtttcctttgtccgcggagcatcacatgagttgaaaacccctttagccagtcttagaattatcctagagaatatgcagcataatattggagattacaaagatcatccaaaatatattgcaaagagtataaataagattgaccagatgagccacttattagaagaagtactggagtcttctaaattccaagagtggacagagtgtcgtgagaccttgactgttaagccagttttagtagatattttatcacgttatcaagaattagctcattcaataggtgttacaattgaaaatcaattgacagatgctaccagggtcgtcatgagtcttagggcattggataaggttttgacaaacctgattagtaatgcaattaaatattcagataaaaatgggcgtgtaatcatatccgagcaagatggctatctctctatcaaaaatacatgtgcgcctctaagtgaccaagaactagaacatttatttgatatattctatcattctcaaatcgtgacagataaggatgaaagttccggtttgggtctttacattgtgaataatattttagaaagctatcaaatggattatagttttctcccttatgaacacggtatggaatttaagattagcttg

SEQ ID NO: 4602 - protein, 443 aa, Streptococcus pneumoniae
  sensor histidine kinase; Cellular location: membrane; Similar to strain R6 sequence 15904038 (0.E+01)
MIKNPKLLTKSFLRSFAILGGVGLVIHIAIYLTFPFYYIQLEGEKFNESARVFTEYLKTKTSDEIPSLLQSYSKSLTISAHLKRDIVDKRLPLVHDLDIKDGKLSNYIVMLDMSVSTADGKQVTVQFVHGVDVYKEAKNILLLYLPYTFLVTIAFSFVFSYFYTKRLLNPLFYISEVTSKMQDLDDNIRFDESRKDEVGEVGKQINGMYEHLLKVIYELESRNEQIVKLQNQKVSFVRGASHELKTPLASLRIILENMQHNIGDYKDHPKYIAKSINKIDQMSHLLEEVLESSKFQEWTECRETLTVKPVLVDILSRYQELAHSIGVTIENQLTDATRVVMSLRALDKVLTNLISNAIKYSDKNGRVIISEQDGYLSIKNTCAPLSDQELEHLFDIFYHSQIVTDKDESSGLGLYIVNNILESYQMDYSFLPYEHGMEFKISL

SEQ ID NO: 4603 - DNA, 651 bp, Streptococcus pneumoniae
atgaacattttagttgcagatgacgaggaaatgattagagaaggaattgcagcatttctgacagaagagggttatcatgtcattatggctaaggatggacaagaggtcttggaaaaatttcaagatctccctatccatctcatggtactggatttaatgatgcctaggaagagtggttttgaagtgttaaaagaaatcaatcaaaagcacgatattcctgtcatcgtcttgagtgctctgggagatgaaactactcagtcacaggtatttgatctctatgctgatgatcatgtgacaaaacctttttctttggtactgcttgtcaagcgtattaaggcgcttatcagacgttactacgtcatagaggatctttggcgatatcaggatgtaacagtggattttacctcttacaaagcacattataaaaatgaagaaattgatctcaaaccaaaggaattactggtactaaagtgtttgattcagcataaaaatcaagttttaagtagagagcagatattggaagaaatttcaaaagatgtagctgatttaccttgtgatagggtcgttgatgtctatattcgtactcttcgcaaaaaattagctttagattgtatcgtgactgtgaaaaatgttgggtataagattagctta

SEQ ID NO: 4604 - protein, 217 aa, Streptococcus pneumoniae
  DNA-binding response regulator; Cellular location: cytoplasm; Similar to strain R6 sequence 15904039 (e-121)
MNILVADDEEMIREGIAAFLTEEGYHVIMAKDGQEVLEKFQDLPIHLMVLDLMMPRKSGFEVLKEINQKHDIPVIVLSALGDETTQSQVFDLYADDHVTKPFSLVLLVKRIKALIRRYYVIEDLWRYQDVTVDFTSYKAHYKNEEIDLKPKELLVLKCLIQHKNQVLSREQILEEISKDVADLPCDRVVDVYIRTLRKKLALDCIVTVKNVGYKISL

SEQ ID NO: 4605 - DNA, 129 bp, Streptococcus pneumoniae
atgatgaaaaccacggatcgtttagaagctataggttttagtttcatactcttcgaaaatctcttcaaaccacgtcagctctatctgcaacctcaaaccagtgttttgagcaacctgcggctagctgcc

SEQ ID NO: 4606 - protein, 43 aa, Streptococcus pneumoniae
  box element
MMKTTDRLEAIGFSFILFENLFKPRQLYLQPQTSVLSNLRLAA

SEQ ID NO: 4607 - DNA, 2430 bp, Streptococcus pneumoniae
atgaactattcaaaagcattgaatgaatgtatcgaaagtgcctacatggttgctggacattttggagctcgttatctagagtcgtggcacttgttgattgccatgtctaatcacagttatagtgtagcaggggcaactttaaatgattatccgtatgagatggaccgtttagaagaggtggctttggaactgactgaaacggactatagccaggatgaaacctttacggaattgccgttctcccgtcgtttgcaggttctttttgatgaagcagagtatgtagcgtcagtggtccatgctaaggtactagggacagagcacgtcctctatgcgattttgcatgatagcaatgccttggcgactcgtatcttggagagggctggtttttcttatgaagacaagaaagatcaggtcaagattgctgctcttcgtcgaaatttagaagaacgggcaggctggactcgtgaagatctcaaggctttacgccaacgccatcgtacagtagctgacaagcaaaattctatggccaatatgatgggcatgccgcagactcctagtggtggtctcgaggattatacgcatgatttgacagagcaagcgcgttctggcaagttagaaccagtcatcggtcgggacaaggaaatctcacgtatgattcaaatcttgagccggaagactaagaacaaccctgtcttggttggggatgctggtgtcgggaaaacagctctggcgcttggtcttgcccagcgtattgctagtggtgacgtgcctgcggaaatggctaagatgcgcgtgttagaacttgatttgatgaatgtcgttgcagggacacgcttccgtggtgactttgaagaacgcatgaataatatcatcaaggatattgaagaagatggccaagtcatcctctttatcgatgaactccacaccatcatgggttctggtagcgggattgattcgactctggatgcggccaatatcttgaaaccagccttggcgcgtggaactttgagaacggttggtgccactactcaggaagaatatcaaaaacatatcgaaaaagatgcggcactttctcgtcgtttcgctaaagtgacgattgaagaaccaagtgtggcagatagtatgactattttacaaggtttgaaggcgacttatgagaaacatcaccgtgtacaaatcacagatgaagcggttgaaacagcggttaagatggctcatcgttatttaaccagtcgtcacttgccagactctgctatcgatctcttggatgaggcggcagcaacagtgcaaaataaggcaaagcatgtaaaagcagacgattcagatttgagtccagctgacaaggccctgatggatggcaagtggaaacaggcagcccagctaatcgcaaaagaagaggaagtacctgtctacaaagacttggtgacagagtctgatattttgaccaccttgagtcgcttgtcaggaatcccagttcaaaaactgactcaaacggatgctaagaagtatttaaatcttgaagcagaactccataaacgggttatcggtcaagatcaagctgtttcaagcattagccgtgccattcgccgcaaccagtcagggattcgcagtcataagcgtccgattggttcctttatgttcctagggcctacaggtgtcgggaaaactgaattagccaaggctctggcagaagttctttttgacgacgaatcagcccttatccgctttgatatgagtgagtatatggagaaatttgcagctagtcgtctcaacggagctcctccaggctatgtaggatatgaagaaggtggggagttgacagagaaggttcgcaataaaccctattccgttctcctctttgatgaggtagagaaggcccacccagatatctttaatgttctcttgcaggttctggatgacggtgtcttgacagatagcaagggacgcaaggtcgatttttcaaataccattatcattatgacatcgaatctaggtgcgactgcccttcgtgatgataagactgttggttttggggctaaggatattcgttttgaccaggaaaatatggaaaaacgcatgtttgaagaactgaaaaaagcttatagaccggaattcatcaaccgtattgatgagaaggtggtcttccatagcctatctagtgatcatatgcaggaagtggtgaagattatggtcaagcctttagtggcaagtttgactgaaaaaggcattgacttgaaattacaagcttcagctctgaaattgttagcaaatcaaggatatgacccagagatgggagctcgcccacttcgcagaaccctgcaaacagaagtggaggacaagttggcagaacttcttctcaagggagatttagtggcaggcagcacacttaagattggtgtcaaagcaggccagttaaaatttgatattgca

SEQ ID NO: 4608 - protein, 810 aa, Streptococcus pneumoniae
  ATP-dependent Clp protease, ATP-binding subunit; Cellular location: cytoplasm; Feature of note: RGD motif; Similar to strain R6 sequence 15904041 (0.E+01)
MNYSKALNECIESAYMVAGHFGARYLESWHLLIAMSNHSYSVAGATLNDYPYEMDRLEEVALELTETDYSQDETFTELPFSRRLQVLFDEAEYVASVVHAKVLGTEHVLYAILHDSNALATRILERAGFSYEDKKDQVKIAALRRNLEERAGWTREDLKALRQRHRTVADKQNSMANMMGMPQTPSGGLEDYTHDLTEQARSGKLEPVIGRDKEISRMIQILSRKTKNNPVLVGDAGVGKTALALGLAQRIASGDVPAEMAKMRVLELDLMNVVAGTRFRGDFEERMNNIIKDIEEDGQVILFIDELHTIMGSGSGIDSTLDAANILKPALARGTLRTVGATTQEEYQKHIEKDAALSRRFAKVTIEEPSVADSMTILQGLKATYEKHHRVQITDEAVETAVKMAHRYLTSRHLPDSAIDLLDEAAATVQNKAKHVKADDSDLSPADKALMDGKWKQAAQLIAKEEEVPVYKDLVTESDILTTLSRLSGIPVQKLTQTDAKKYLNLEAELHKRVIGQDQAVSSISRAIRRNQSGIRSHKRPIGSFMFLGPTGVGKTELAKALAEVLFDDESALIRFDMSEYMEKFAASRLNGAPPGYVGYEEGGELTEKVRNKPYSVLLFDEVEKAHPDIFNVLLQVLDDGVLTDSKGRKVDFSNTIIIMTSNLGATALRDDKTVGFGAKDIRFDQENMEKRMFEELKKAYRPEFINRIDEKVVFHSLSSDHMQEVVKIMVKPLVASLTEKGIDLKLQASALKLLANQGYDPEMGARPLRRTLQTEVEDKLAELLLKGDLVAGSTLKIGVKAGQLKFDIA

SEQ ID NO: 4609 - DNA, 456 bp, Streptococcus pneumoniae
atgagatttaaaaatacatcggatcatattgaggcctacatcaaggcgattttagatcaatctggtatcgtggagttgcaacggagtcagttggcagatacctttcaggttgttcctagtcagattaactacgtgatcaagacacgctttacggaaagtagaggctacttggttgaaagtaagcgtggtggcggaggctacattcgtataggacggattgagttttctagtcatcatgaaatgctccgggagctgctttactcgattggtgagcgagtcagtcaagaaatttatgaggatattctccagcttttggttgagcaggaattgatgaccaagcaggagatgaatttgctagaatcagtagctttggatcgcgttttaggagaagaagctccagttgttcgagcaaacatgctacgtcagatcatacaagaggtagatagaaaagggaag

SEQ ID NO: 4610 - protein, 152 aa, Streptococcus pneumoniae
  transcriptional regulator CtsR (ctsR); Cellular location: cytoplasm; Similar to strain R6 sequence 15904042 (2.E-80)
MRFKNTSDHIEAYIKAILDQSGIVELQRSQLADTFQVVPSQINYVIKTRFTESRGYLVESKRGGGGYIRIGRIEFSSHHEMLRELLYSIGERVSQEIYEDILQLLVEQELMTKQEMNLLESVALDRVLGEEAPVVRANMLRQIIQEVDRKGK

SEQ ID NO: 4611 - DNA, 726 bp, Streptococcus pneumoniae
atgacagaaattagactagagcacgtcagttatgcctatggtcaggagaggattttagaggatatcaacctacaggtgacttcaggcgaagtggtttccatcctaggcccaagtggtgttggaaagaccaccctctttaatctaatcgctgggattttagaagttcagtcagggagaattgtccttgatggtgaagaaaatcccaaggggcgcgtgagttatatgttgcaaaaggatctgctcttggagcacaagacggtgcttggaaatatcattctgcccctcttgattcaaaaggtggataaggcagaagctatttcccgagcggataaaattcttgcgaccttccagctgacagctgtaagagacaagtatcctcatgaacttagcggtgggatgcgccagcgtgtagccttactccggacctacctttttgggcacaagctctttctcttagatgaggcctttagcgccttggatgagatgacaaagatggaactccacgcttggtatcttgagattcacaagcagttgcagctaacaaccctgatcatcacgcatagtattgaggaggccctcaatctcagcgaccgtatctatatcttgaaaaatcgccctgggcagattgtttcagaaattaaactagattggtctgaagatgaggacaaggaagtccaaaagattgcctacaaacgtcaaattttggcggaattaggcttagataag

SEQ ID NO: 4612 - protein, 242 aa, Streptococcus pneumoniae
  ABC transporter, ATP-binding protein; Cellular location: cytoplasm; Similar to strain R6 sequence 15904043 (e-134)
MTEIRLEHVSYAYGQERILEDINLQVTSGEVVSILGPSGVGKTTLFNLIAGILEVQSGRIVLDGEENPKGRVSYMLQKDLLLEHKTVLGNIILPLLIQKVDKAEAISRADKILATFQLTAVRDKYPHELSGGMRQRVALLRTYLFGHKLFLLDEAFSALDEMTKMELHAWYLEIHKQLQLTTLIITHSIEEALNLSDRIYILKNRPGQIVSEIKLDWSEDEDKEVQKIAYKRQILAELGLDK

SEQ ID NO: 4613 - DNA, 1005 bp, Streptococcus pneumoniae
atgaagaaaacatggaaagtgtttttaacgcttgtaacagctcttgtagctgttgtgcttgtggcctgtggtcaaggaactgcttctaaagacaacaaagaggcagaacttaagaaggttgactttatcctagactggacaccaaataccaaccacacagggctttatgttgccaaggaaaaaggttatttcaaagaagctggagtggatgttgatttgaaattgccaccagaagaaagttcttctgacttggttatcaacggaaaggcaccatttgcagtgtatttccaagactacatggctaagaaattggaaaaaggagcaggaatcactgccgttgcagctattgttgaacacaatacatcaggaatcatctctcgtaaatctgataatgtaagcagtccaaaagacttggttggtaagaaatatgggacatggaatgacccaactgaacttgctatgttgaaaaccttggtagaatctcaaggtggagactttgagaaggttgaaaaagtaccaaataacgactcaaactcaatcacaccgattgccaatggcgtctttgatactgcttggatttactacggttgggatggtatccttgctaaatctcaaggtgtagatgctaacttcatgtacttgaaagactatgtcaaggagtttgactactattcaccagttatcatcgcaaacaacgactatctgaaagataacaaagaagaagctcgcaaagtcatccaagccatcaaaaaaggctaccaatatgccatggaacatccagaagaagctgcagatattctcatcaagaatgcacctgaactcaaggaaaaacgtgactttgtcatcgaatctcaaaaatacttgtcaaaagaatacgcaagcgacaaggaaaaatggggtcaatttgacgcagctcgctggaatgctttctacaaatgggataaagaaaatggtatccttaaagaagacttgacagacaaaggcttcaccaacgaatttgtgaaa

SEQ ID NO: 4614 - protein, 335 aa, Streptococcus pneumoniae
  ABC transporter, substrate-binding protein, putative; Cellular location: lipoprotein; Similar to strain R6 sequence 15904044 (0.E+01)
MKKTWKVFLTLVTALVAVVLVACGQGTASKDNKEAELKKVDFILDWTPNTNHTGLYVAKEKGYFKEAGVDVDLKLPPEESSSDLVINGKAPFAVYFQDYMAKKLEKGAGITAVAAIVEHNTSGIISRKSDNVSSPKDLVGKKYGTWNDPTELAMLKTLVESQGGDFEKVEKVPNNDSNSITPIANGVFDTAWIYYGWDGILAKSQGVDANFMYLKDYVKEFDYYSPVIIANNDYLKDNKEEARKVIQAIKKGYQYAMEHPEEAADILIKNAPELKEKRDFVIESQKYLSKEYASDKEKWGQFDAARWNAFYKWDKENGILKEDLTDKGFTNEFVK

SEQ ID NO: 4615 - DNA, 747 bp, Streptococcus pneumoniae
ttgagaagtatactgagacgacacattagtctattgggctttctcggagtattgtcaatctggcagttagcaggttttcttaaacttctccccaagtttatcctgccgacacctcttgaaattctccagccctttgttcgtgacagagaatttctctggcaccatagctgggcgaccttgagagtggctttactggggctgattttgggagttttgattgcctgtcttatggctgtgctcatggatagtttgacttggctcaatgacctgatttaccctatgatggtggtcattcagaccattccgaccattgccatagctcctatcctggtcttgtggctaggttatgggattttgcccaagattgtcttgattatcttaacgacaacctttcccatcatcgttagtattttggacggttttaggcattgcgacaaggatatgctgaccttgtttagtctgatgcgggccaagccttggcaaatcctgtggcattttaaaatcccagttagcctgccttacttttatgcaggtctgagggtcagtgtctcctacgcctttatcacaactgtggtatctgagtggttgggaggttttgaaggtcttggtgtttatatgattcagtctaaaaaactgtttcagtatgataccatgtttgccattattattctggtgtcgattatcagtcttttgggtatgaagctggtcgatatcagtgaaaaatatgtgattaaatggaaacgttcg

SEQ ID NO: 4616 - protein, 249 aa, Streptococcus pneumoniae
  ABC transporter, permease protein; Cellular location: membrane; Similar to strain R6 sequence 15904045 (e-140)
MRSILRRHISLLGFLGVLSIWQLAGFLKLLPKFILPTPLEILQPFVRDREFLWHHSWATLRVALLGLILGVLIACLMAVLMDSLTWLNDLIYPMMVVIQTIPTIAIAPILVLWLGYGILPKIVLIILTTTFPIIVSILDGFRHCDKDMLTLFSLMRAKPWQILWHFKIPVSLPYFYAGLRVSVSYAFITTVVSEWLGGFEGLGVYMIQSKKLFQYDTMFAIIILVSIISLLGMKLVDISEKYVIKWKRS

SEQ ID NO: 4617 - DNA, 270 bp, Streptococcus pneumoniae
ttgcaagttttacccctagtacaggggattgatcggatagctgttattgatcaggtcattgcttatctgcaaactcaagaagtgacgatggtagtgacaccatttgaaacggtcttggaaggggagtttgatgagcttatgcgcattctaaaagaagcgctggaagtggcagggcaggaggcagacaatgtctttgccaatgtcaaaataaatgtaggagagattttaagtattgatgagaaacttgagaagtatactgagacgacacat

SEQ ID NO: 4618 - protein, 90 aa, Streptococcus pneumoniae
  conserved hypothetical protein; Cellular location: outside; Similar to strain R6 sequence 15904046 (4.E-48)
MQVLPLVQGIDRIAVIDQVIAYLQTQEVTMVVTPFETVLEGEFDELMRILKEALEVAGQEADNVFANVKINVGEILSIDEKLEKYTETTH

SEQ ID NO: 4619 - DNA, 108 bp, Streptococcus pneumoniae
atgatagcgcaaaataagaaaaatgtcaaggaaactgcttacagaaaagagcaggaaatttctcctactccaattttctatactcgttctccatcactgtttactctg

SEQ ID NO: 4620 - protein, 36 aa, Streptococcus pneumoniae
  hypothetical protein; Cellular location: cytoplasm
MIAQNKKNVKETAYRKEQEISPTPIFYTRSPSLFTL

SEQ ID NO: 4621 - DNA, 1344 bp, Streptococcus pneumoniae
atgaaaattttaccgtttatagcaagaggaacaagttattacttgaagatgtcagttaaaaagcttgttccttttttagtagtaggattgatgctagcagctggtgatagtgtctatgcctattccagaggaaatggatcgattgcgcgtggggatgattatcctgcttattataaaaatgggagccaggagattgatcagtggcgcatgtattctcgtcagtgtacttcttttgtagcctttcgtttgagtaatgtcaatggttttgaaattccggcagcttatggaaatgcgaatgaatggggacatcgtgctcgtcgggaaggttatcgtgtagataatacaccgacgattggttccattacttggtctactgcaggaacttatggtcatgttgcctgggtgtcaaatgtaatgggagatcagattgagattgaggaatataactatggttatacagaatcctataataaacgagttataaaagcaaacacgatgacaggatttattcattttaaagatttggatggtggcagtgttgggaatagtcaatcctcaacttcaacaggcggaactcattattttaagaccaagtctgctattaaaactgaacctctagctagcggaactgtgattgattactattatcctggggagaaggttcattatgatcagatacttgaaaaagacggctataagtggttgagttatactgcctataatggaagctatcgttatgttcaattggaggctgtgaataaaaatcctctaggtaattctgttctttcttcaacaggtggaactcattattttaagaccaagtctgctatcaaaactgaacccctagttagtgcaactgtgattgattactattatcctggagagaaggttcattatgatcaaattctcgaaaaagacggctacaagtggttgagttatacggcttataacggaagtcgtcgctatatacagctagagggagtgacttcttcacaaaattatcagaatcaatcaggaaacatctctagctatggatcccatagtagttcaactgtcggttggaagaaaataaatggtagttggtatcatttcaaatcaaatggttctaaatcaacaggatggctgaaagacggttctagctggtattatttgaaattatctggtgaaatgcagacaggatggttaaaggaaaatggtttgtggtattatctgggtagttcaggggcaatgaaaacaggctggtaccaggtctctggtaagtggtattattcttactcttcaggcgccttagctgttaatacgacggtggatggctacagagtaaacagtgatggagaacgagta

SEQ ID NO: 4622 - protein, 448 aa, Streptococcus pneumoniae
  choline binding protein D (cbpD); Cellular location: membrane; Feature of note: WYY motif, RGD motif; Similar to strain R6 sequence 15904047 (0.E+01)
MKILPFIARGTSYYLKMSVKKLVPFLVVGLMLAAGDSVYAYSRGNGSIARGDDYPAYYKNGSQEIDQWRMYSRQCTSFVAFRLSNVNGFEIPAAYGNANEWGHRARREGYRVDNTPTIGSITWSTAGTYGHVAWVSNVMGDQIEIEEYNYGYTESYNKRVIKANTMTGFIHFKDLDGGSVGNSQSSTSTGGTHYFKTKSAIKTEPLASGTVIDYYYPGEKVHYDQILEKDGYKWLSYTAYNGSYRYVQLEAVNKNPLGNSVLSSTGGTHYFKTKSAIKTEPLVSATVIDYYYPGEKVHYDQILEKDGYKWLSYTAYNGSRRYIQLEGVTSSQNYQNQSGNISSYGSHSSSTVGWKKINGSWYHFKSNGSKSTGWLKDGSSWYYLKLSGEMQTGWLKENGLWYYLGSSGAMKTGWYQVSGKWYYSYSSGALAVNTTVDGYRVNSDGERV

SEQ ID NO: 4623 - DNA, 264 bp, Streptococcus pneumoniae
atgtcagatgcatttacagatgtagccaagatgaaaaaaatcaaagaagaaatcaaggcacatgagggacaagtcgtagaaatgactttggagaatggtcgtaagcgccaaaaaaatagattgggtaagctaattgaagtttatccatctctatttattgtggagtttggggatgtggaaggagataaacaagttaatgtttacgttgaatcctttacttactcagatattcttacagaaaagaatttgattcattatcttgac

SEQ ID NO: 4624 - protein, 88 aa, Streptococcus pneumoniae
  conserved hypothetical protein; Cellular location: cytoplasm; Similar to strain R6 sequence 15904048 (2.E-46)
MSDAFTDVAKMKKIKEEIKAHEGQVVEMTLENGRKRQKNRLGKLIEVYPSLFIVEFGDVEGDKQVNVYVESFTYSDILTEKNLIHYLD

SEQ ID NO: 4625 - DNA, 1350 bp, Streptococcus pneumoniae
atggcagaagtagaagagttacgagtacaacctcaagatatcttagctgagcaatccgttttaggggctatctttattgatgagagtaaacttgtttttgtgcgagaatacattgagtctcgggacttttttaagtatgcccatcgtttgattttccaagccatggtcgatttatccgatcgtggtgatgccatagatgcaacaacggttcgtactatccttgataatcaaggtgatttacagaatattggtggcttgtcttacttggttgagattgttaattctgtgccaacttctgctaatgcggagtattatgctaagattgttgcagaaaaagcaatgctacgtcgtttaattgccaagttgacagagtctgtcaaccaagcttacgaagcgtcacaaccagctgatgaaattattgctcaggcagaaaaagggttgattgatgtcagtgaaaatgcaaatcgaagcgggtttaagaacattcgagatgtgttgaatctcaactttggaaatctggaagctcgctcgcaacaaacgaccgatattacaggtattgcgacaggttatcgtgatttggatcatatgacaacaggacttcatgaggaggagttgattatcttagcagctcgtccagcagttggtaagacagcatttgccttgaatatcgctcagaacattgggactaagttggacaaaacggttgctattttttcactcgaaatgggtgcggaaagcttggtagatcgtatgttagctgcagaaggcttagtggagtcacattctatccgtacagggcaattgacagatgaggagtggcaaaaatatactattgctcagggtaatctagctaacgccagtatctatatcgatgatacgccaggtattcggattacagagattcgttctcgttctcgtaaattggctcaagaaactggaaatcttggtttgattttgatagactatttgcaacttatcacgggaactggtcgagaaaatcgtcaacaagaagtttctgaaatttctcgtcagttgaaaatactagccaaggaattgaaggttccagtaatcgctctgagtcagctttctcgtggtgtagaacaacgtcaggacaagagaccggtcttgtctgatattcgtgaatctgggtctattgagcaggacgctgatatcgtagcttttctctatcgcgatgactactatgaacgtggtggtgaagaagaggagggtatcccaaataataaggtggaagttattatcgagaaaaaccgtagtggagctcgtggaacagtggaattgattttccaaaaagaatacaataaattttcaagtatctcaaagagggaggca

SEQ ID NO: 4626 - protein, 450 aa, Streptococcus pneumoniae
  replicative DNA helicase (dnaC); Cellular location: cytoplasm; Similar to strain R6 sequence 15904049 (0.E+01)
MAEVEELRVQPQDILAEQSVLGAIFIDESKLVFVREYIESRDFFKYAHRLIFQAMVDLSDRGDAIDATTVRTILDNQGDLQNIGGLSYLVEIVNSVPTSANAEYYAKIVAEKAMLRRLIAKLTESVNQAYEASQPADEIIAQAEKGLIDVSENANRSGFKNIRDVLNLNFGNLEARSQQTTDITGIATGYRDLDHMTTGLHEEELIILAARPAVGKTAFALNIAQNIGTKLDKTVAIFSLEMGAESLVDRMLAAEGLVESHSIRTGQLTDEEWQKYTIAQGNLANASIYIDDTPGIRITEIRSRSRKLAQETGNLGLILIDYLQLITGTGRENRQQEVSEISRQLKILAKELKVPVIALSQLSRGVEQRQDKRPVLSDIRESGSIEQDADIVAFLYRDDYYERGGEEEEGIPNNKVEVIIEKNRSGARGTVELIFQKEYNKFSSISKREA

SEQ ID NO: 4627 - DNA, 450 bp, Streptococcus pneumoniae
atgaaagtaatctttttagcagatgttaaaggaaaaggtaaaaaaggcgaaattaaggaagtaccaacagggtatgcgcaaaactttcttatcaaaaagaatctagccaaagaagcgactgctcaagctgtaggtgaacttcgtggtaaacaaaaatcggaagaaaaagctcacgctgagatgattgcagaaggaaaagcaattaaagcacaacttgaagcagaagaaactgttgtagaatttgttgaaaaagttggtccagatggtcgtacctttggttctattaccaataagaagattgcagaagaattgcaaaagcaatttggaattaagattgataaacgtcatattcaagtacaagctccgattcgagcggttggtttgattgatgtgccagtgaaaatctatcaagatatcacaagtgtaatcaatcttcgtgtgaaagaagga

SEQ ID NO: 4628 - protein, 150 aa, Streptococcus pneumoniae
  ribosomal protein L9 (rplI); Cellular location: cytoplasm; Similar to strain R6 sequence 15904050 (3.E-80)
MKVIFLADVKGKGKKGEIKEVPTGYAQNFLIKKNLAKEATAQAVGELRGKQKSEEKAHAEMIAEGKAIKAQLEAEETVVEFVEKVGPDGRTFGSITNKKIAEELQKQFGIKIDKRHIQVQAPIRAVGLIDVPVKIYQDITSVINLRVKEG

SEQ ID NO: 4629 - DNA, 1971 bp, Streptococcus pneumoniae
atgaaaaaattttatgtaagtccaatttttcctattctagtaggattgattgcgtttggagtcttatccactttcattatttttgttaataataatctgttgacggttttaattttgtttctttttgtaggaggctatgtttttttatttaagaaactgagagtgcattatacaaggagtgatgtagaacagatacagtatgtaaaccaccaagcggaagaaagtttgacagctctattggaacagatgcctgtaggtgttatgaaattgaatttatcttctggagaggttgagtggtttaatccctatgctgaattgattttgaccaaggaagatggtgattttgatttagaagctgttcaaacgattatcaaggcttcagtaggaaatccgtctacttatgccaagcttggtgagaagcgttatgctgttcatatggatgcttcttccggtgttttgtattttgtagatgtatccagggaacaagccataacagatgaattggtaacaagtagaccagtgattgggattgtctctgtggataattatgatgatttggaggatgaaacttctgagtcagatattagtcaaatcaatagttttgtagctaattttatatcagagttttcagaaaaacacatgatgttttctcgtcgggtaagtatggatcgattttatctatttactgactacacggtgcttgagggcttgatgaatgataaattttctgttattgatgctttcagagaagagtcgaaacagagacagttgcccttgaccttaagtatgggattttcttatggcgatggaaatcatgatgagatagggaaagttgctttgctcaatttgaacttggctgaagtacgtggtggcgaccaggtggttgttaaggaaaacgacgaaacgaaaaatccagtttattttggtggtgggtctgctgcttcaatcaagcgtacacggactcgtacgcgcgctatgatgacagctatttcagataagattcggagtgtagatcaggtttttgtagtcggtcacaaaaatttagacatggatgctttgggctctgctgtaggtatgcagttgttcgccagcaatgtgattgaaaatagctatgctctttatgatgaagaacaaatgtctccagatattgaacgagctgtttcattcatagaaaaagaaggagttacgaagttgttgtctgttaaggatgcaatggggatggtgaccaatcgttctttgttgattcttgtagaccattcaaagacagccttaacattatcaaaagaattttatgatttatttacccaaaccattgttattgaccaccatagaagggatcaggattttccagataatgcggttattacttatatcgaaagtggtgcaagtagtgccagtgagttggtaacggaattgattcagttccagaattctaagaaaaatcgtttgagtcgtatgcaagcaagtgtcttgatggctggtatgatgttggatactaaaaatttcacctcgcgagtaactagtcggacatttgatgttgctagctatctcagaacgcgcggaagtgatagtattgctatccaggaaatcgctgcgacagattttgaagaatatcgtgaggtcaatgaacttattttacaggggcgtaaattaggttcagatgtactaatagcagaggctaaggacatgaaatgctatgatacagttgttattagtaaggcagcagatgccatgttagccatgtcaggtattgaagcgagttttgttcttgcgaagaatacacaaggatttatctctatctcagctcgaagtcgtagtaaactgaatgtacaacggattatggaagagttaggcggtggaggccactttaatttggcagcagctcaaattaaagatgtaaccttgtcagaagcaggtgaaaaactgacagaaattgtattaaatgaaatgaaggaaaaggagaaagaagaa

SEQ ID NO: 4630 - protein, 657 aa, Streptococcus pneumoniae
  DHH subfamily 1 protein; Cellular location: membrane; Similar to strain R6 sequence 15904051 (0.E+01)
MKKFYVSPIFPILVGLIAFGVLSTFIIFVNNNLLTVLILFLFVGGYVFLFKKLRVHYTRSDVEQIQYVNHQAEESLTALLEQMPVGVMKLNLSSGEVEWFNPYAELILTKEDGDFDLEAVQTIIKASVGNPSTYAKLGEKRYAVHMDASSGVLYFVDVSREQAITDELVTSRPVIGIVSVDNYDDLEDETSESDISQINSFVANFISEFSEKHMMFSRRVSMDRFYLFTDYTVLEGLMNDKFSVIDAFREESKQRQLPLTLSMGFSYGDGNHDEIGKVALLNLNLAEVRGGDQVVVKENDETKNPVYFGGGSAASIKRTRTRTRAMMTAISDKIRSVDQVFVVGHKNLDMDALGSAVGMQLFASNVIENSYALYDEEQMSPDIERAVSFIEKEGVTKLLSVKDAMGMVTNRSLLILVDHSKTALTLSKEFYDLFTQTIVIDHHRRDQDFPDNAVITYIESGASSASELVTELIQFQNSKKNRLSRMQASVLMAGMMLDTKNFTSRVTSRTFDVASYLRTRGSDSIAIQEIAATDFEEYREVNELILQGRKLGSDVLIAEAKDMKCYDTVVISKAADAMLAMSGIEASFVLAKNTQGFISISARSRSKLNVQRIMEELGGGGHFNLAAAQIKDVTLSEAGEKLTEIVLNEMKEKEKEE

SEQ ID NO: 4631 - DNA, 546 bp, Streptococcus pneumoniae
atgattaaatatagtatccgtggtgaaaacctagaagtaacagaagcaattcgtgattatgtagtttctaaactcgaaaagatcgaaaagtacttccaaccagaacaagagttggatgcccgaattaacttaaaagtttatcgtgaaaaaacggctaaagtggaagtaacgattccgcttggatctattactctccgcgcagaagatgtatctcaagatatgtatggttcaattgaccttgtaactgataaaattgaacgtcagattcgtaaaaataaaacaaaaatcgagcgtaaaaataaaaataaggtagcaactggtcaattatttacagatgctttggtggaagattcaaatattgtccagtctaaagttgttcgttcaaaacaaattgatttaaaaccaatggatttggaagaagcaattctacaaatggatttattggggcatgatttctttatctatgtggatgttgaagatcagacaaccaatgtgatttatcgtcgtgaggatggcgaaattggtttgttagaggttaaagaatct

SEQ ID NO: 4632 - protein, 182 aa, Streptococcus pneumoniae
  ribosomal subunit interface protein (yfiA); Cellular location: cytoplasm; Similar to strain R6 sequence 15904052 (1.E-98)
MIKYSIRGENLEVTEAIRDYVVSKLEKIEKYFQPEQELDARINLKVYREKTAKVEVTIPLGSITLRAEDVSQDMYGSIDLVTDKIERQIRKNKTKIERKNKNKVATGQLFTDALVEDSNIVQSKVVRSKQIDLKPMDLEEAILQMDLLGHDFFIYVDVEDQTTNVIYRREDGEIGLLEVKES

SEQ ID NO: 4633 - DNA, 660 bp, Streptococcus pneumoniae
atgaagtgcttgttatgtgggcagactatgaagactgttttaacttttagtagtctcttacttctgaggaatgatgactcttgtctttgttcagactgtgattctacttttgaaagaattggggaagagaactgtccaaattgtatgaaaacagagttgtcaacaaagtgtcaagattgtcaactttggtgtaaagagggagttgaagtcagtcatagagcgatttttacttacaatcaagctatgaaggattttttcagtcggtataagtttgatggagacttcctgttaagaaaagttttcgcttcatttttaagtgaggagttgaaaaagtacaaagagtatcaatttgttgtaattcccctaagtcctgatagatatgctaatagaggatttaatcaggttgagggcttggtagaggcagcaggctttgagtatctggatttattagagaaaagagaagagagagccagttcttctaaaaatcgttcagagcgcttggggacagaacttcctttctttattaaaagtggagtcactattcctaaaaaaatcctacttatagatgatatctatactacaggagcaactataaatcgtgttaagaaactgttggaagaagctggtgctaaggatgtaaaaacattttcccttgtaaga

SEQ ID NO: 4634 - protein, 220 aa, Streptococcus pneumoniae
  competence protein ComF, putative; Cellular location: outside; Similar to strain R6 sequence 15904053 (e-126)
MKCLLCGQTMKTVLTFSSLLLLRNDDSCLCSDCDSTFERIGEENCPNCMKTELSTKCQDCQLWCKEGVEVSHRAIFTYNQAMKDFFSRYKFDGDFLLRKVFASFLSEELKKYKEYQFVVIPLSPDRYANRGFNQVEGLVEAAGFEYLDLLEKREERASSSKNRSERLGTELPFFIKSGVTIPKKILLIDDIYTTGATINRVKKLLEEAGAKDVKTFSLVR

SEQ ID NO: 4635 - DNA, 1296 bp, Streptococcus pneumoniae
atgaaagtaaatttagattatctcggtcgtttatttactgagaatgaattaacagaagaagaacgtcagttggcggagaaacttccagcaatgagaaaggagaaggggaaacttttctgtcaacgctgtaatagtactattctagaagaatggtatttgcccatcggtgcttactattgtcgagagtgcttgctgatgaagcgagtcagaagtgatcaaactttatactattttccgcaggaggattttccaaagcaagatgttctcaaatggcgcggccaattaactccttttcaagagaaggtgtcagagggattgcttcaagtagtagacaagcaaaagccaaccttagttcatgcggtaacaggagctggaaagacagaaatgatttatcaagtagtggctaaagtgatcaatgcgggtggtgcagtgtgtttggctagtcctcgcatagatgtttgtttggagctgtacaagcgcctgcaacaggatttttcttgcgggatagctttgctacatggagaatcggaaccttattttcgaacaccactagttgttgcaacaacccatcagttattgaagttttatcaagcttttgatttgctgatagtggatgaagtagatgcttttccttatgttgataatcccatgctttaccacgctgtcaagaatagtgtaaaggagaatggattgagaatctttttaacagcgacttcgaccaatgagttagataaaaaggtccgtttaggagaactaaaaagactgaatttaccgagacggtttcatggaaatccgttgattattccaaaaccaatttggttatcggattttaatcgctacttagacaagaatcgtttgtcaccaaagttaaagtcctatattgagaagcagagaaagacagcttatccgttactcatttttgcttcagaaattaagaaaggggagcagttagcagaaatcttacaggagcaatttccaaatgagaaaattggctttgtatcttctgtaacagaggatcgattagagcaagtacaagcttttcgagatggagaactgacaatacttatcagtacgacaatcttggagcgcggagttaccttcccttgtgtggatgttttcgtagtagaggccaatcatcgtttgtttaccaagtctagtttgattcagattggtggacgagttggacgaagcatggatagaccgacaggagatttgcttttcttccatgatgggttaaatgcttcaatcaagaaggcgattaaggaaattcagatgatgaataaggaggctggtcta

SEQ ID NO: 4636 - protein, 432 aa, Streptococcus pneumoniae
  helicase, putative; Cellular location: cytoplasm; Similar to strain R6 sequence 15904054 (0.E+01)
MKVNLDYLGRLFTENELTEEERQLAEKLPAMRKEKGKLFCQRCNSTILEEWYLPIGAYYCRECLLMKRVRSDQTLYYFPQEDFPKQDVLKWRGQLTPFQEKVSEGLLQVVDKQKPTLVHAVTGAGKTEMIYQVVAKVINAGGAVCLASPRIDVCLELYKRLQQDFSCGIALLHGESEPYFRTPLVVATTHQLLKFYQAFDLLIVDEVDAFPYVDNPMLYHAVKNSVKENGLRIFLTATSTNELDKKVRLGELKRLNLPRRFHGNPLIIPKPIWLSDFNRYLDKNRLSPKLKSYIEKQRKTAYPLLIFASEIKKGEQLAEILQEQFPNEKIGFVSSVTEDRLEQVQAFRDGELTILISTTILERGVTFPCVDVFVVEANHRLFTKSSLIQIGGRVGRSMDRPTGDLLFFHDGLNASIKKAIKEIQMMNKEAGL

SEQ ID NO: 4637 - DNA, 633 bp, Streptococcus pneumoniae
atggaatttaggacaattaaagaggacggtcaagtccaagaagaaatcaaaaaatctcgctttatctgccatgccaagcgtgtttatagcgaagaagaggctcgtgacttcattactgccatcaaaaaagaacactacaaagcgacacataactgctctgccttcattattggagaacgtagtgaaattaaacgtacaagtgatgatggtgagcctagtggtactgctggtgttcccatgcttggggtactagaaaatcacaatctcaccaatgtctgtgtggtcgtgacacgctactttggtggtattaaactaggcgctggaggactaattcgtgcttacgccggcagtgtcgccttagctgtcaaagaaattggtattattgaaataaaagaacaggctggcattgctattcaaatgtcttatgctcagtaccaagagtacagtaacttccttaaagaacatggtctcatggagctggatacaaactttacagatcaagtcgatacgatgatttatgttgataaagaagaaaaagaaactattaaagctgcacttgtggagttttttaatggaaaagtcactttaactgaccaaggtttacgagaggttgaagttcctgtaaacttagtg

SEQ ID NO: 4638 - protein, 211 aa, Streptococcus pneumoniae
  conserved hypothetical protein; Cellular location: cytoplasm; Similar to strain R6 sequence 15904055 (e-118)
MEFRTIKEDGQVQEEIKKSRFICHAKRVYSEEEARDFITAIKKEHYKATHNCSAFIIGERSEIKRTSDDGEPSGTAGVPMLGVLENHNLTNVCVVVTRYFGGIKLGAGGLIRAYAGSVALAVKEIGIIEIKEQAGIAIQMSYAQYQEYSNFLKEHGLMELDTNFTDQVDTMIYVDKEEKETIKAALVEFFNGKVTLTDQGLREVEVPVNLV

SEQ ID NO: 4639 - DNA, 918 bp, Streptococcus pneumoniae
atgtctatttataacaacattactgaattaatcggtcaaacaccgattgttaaacttaacaacatcgtgccagaaggtgctgcagacgtctatataaagcttgaagcatttaatcctggttcatctgtaaaagaccgtattgcccttagcatgattgaaaaagctgaacaagatggtattctgaaacctggttctactattgttgaagcaacaagtggaaacaccggtattggactttcatgggtaggtgctgctaaagggtataaagtcgtcatcgttatgcctgaaactatgagtgtagaacgacgtaaaattatccaagcttatggtgctgaactcgtcctaactcctggtagcgagggaatgaaaggtgctattgctaaggctcaagaaatcgctgctgaacgtgatggtttccttcctcttcaatttgacaatccagctaatccagaagtacacgaaagaacaacaggagctgagatactagctgctttcggtaaagatggattagatgcctttgttgctggagtaggtactggtggaacgatttctggtgtttctcatgcactcaaatcagaaaattctaacattcaagtttttgcagtagaagcagatgaatctgctattctatctggtgaaaaacctggtcctcacaaaattcaaggtatctcagctggatttattcctgatacacttgatactaaagcctatgatggtatcgttcgtgtaacatcagatgacgctcttgcactcggacgtgaaattggtggaaaagaaggcttccttgtagggatttcctcagctgcagctatctacggagccatcgaggttgccaaaaaattaggtacaggtaaaaaagtccttgccctagcaccagataacggtgaacgttatctctctacagcactttatgaattg

SEQ ID NO: 4640 - protein, 306 aa, Streptococcus pneumoniae
  cysteine synthase (cysM); Cellular location: membrane; Similar to strain R6 sequence 15904056 (e-170)
MSIYNNITELIGQTPIVKLNNIVPEGAADVYIKLEAFNPGSSVKDRIALSMIEKAEQDGILKPGSTIVEATSGNTGIGLSWVGAAKGYKVVIVMPETMSVERRKIIQAYGAELVLTPGSEGMKGAIAKAQEIAAERDGFLPLQFDNPANPEVHERTTGAEILAAFGKDGLDAFVAGVGTGGTISGVSHALKSENSNIQVFAVEADESAILSGEKPGPHKIQGISAGFIPDTLDTKAYDGIVRVTSDDALALGREIGGKEGFLVGISSAAAIYGAIEVAKKLGTGKKVLALAPDNGERYLSTALYEL

SEQ ID NO: 4641 - DNA, 396 bp, Streptococcus pneumoniae
gtgaaagctcctattcctaaagcccctttagcgcataactttggctcagcttctattatcgctcacaccatccatcagaagtttaatctgaaggtacccaattatcgccaagaagaagattgggctaggatgggtttaccaatcacacgtaaggaaatctctaattggcatatcaagacgagtcaatactatttggagcccctttataacctcttgcgagagagactattgactcagcccttacttcatgcggatgaaacttcttatagggtgctagagagtgatagtcagctgacttactattggacttttttgtctgggaaagctgagaaacaagggattacgctttaccatcatgttctaatcgatttgttcatatcttatttcaatccatta

SEQ ID NO: 4642 - protein, 132 aa, Streptococcus pneumoniae
  IS66 family element, Orf3, degenerate
MKAPIPKAPLAHNFGSASIIAHTIHQKFNLKVPNYRQEEDWARMGLPITRKEISNWHIKTSQYYLEPLYNLLRERLLTQPLLHADETSYRVLESDSQLTYYWTFLSGKAEKQGITLYHHVLIDLFISYFNPL

SEQ ID NO: 4643 - DNA, 243 bp, Streptococcus pneumoniae
atggacaatgctatatggcataaatcaagtaccttaaagattccgactaatattggctttgcatttattcctccatacacaccagagatgaaccccattgaacaagtgtggaaagagattcgtaaacgtggatttaagaataaagcctttcgaactttggaagatgtcatacaaggactggagaaggaggtgataaagtccatcgttaatcggagacggactagaatgctttttgaaaacaga

SEQ ID NO: 4644 - protein, 81 aa, Streptococcus pneumoniae
  transposase family protein, truncation; Cellular location: cytoplasm; Similar to strain R6 sequence 15902688 (6.E-40)
MDNAIWHKSSTLKIPTNIGFAFIPPYTPEMNPIEQVWKEIRKRGFKNKAFRTLEDVIQGLEKEVIKSIVNRRRTRMLFENR

SEQ ID NO: 4645 - DNA, 321 bp, Streptococcus pneumoniae
atgataattcaactaagtgatttaggtcaagttcaccttgtttgtggcaagacagatatgaggcagggaatagactcattagcctatgtagttaaaacccactttgaattggatcctttctccgatcaagtctttctcttttgtggtggacgtaaagaccgctttaaagttctttactgggatggtcaaggattttggatattatataaacgctttgagaacggaaaactgacttggtccagtacagaaaaggatgtcaaagctctcgcacctgaacaagtagattggctgatgaagggcttttctatcactccccaaata

SEQ ID NO: 4646 - protein, 107 aa, Streptococcus pneumoniae
  IS66 family element, Orf2, interruption; Cellular location: cytoplasm; Similar to strain R6 sequence 15904060 (0.E+01)
MIIQLSDLGQVHLVCGKTDMRQGIDSLAYVVKTHFELDPFSDQVFLFCGGRKDRFKVLYWDGQGFWILYKRFENGKLTWSSTEKDVKALAPEQVDWLMKGFSITPQI

SEQ ID NO: 4647 - DNA, 1038 bp, Streptococcus pneumoniae
atggcagaaattacagctaaacttgtaaaagagttgcgtgaaaaatctggtgccggtgttatggacgctaaaaaagcgcttgtagaaacagacggtgacatcgaaaaagcgattgaattgcttcgtgaaaaaggtatggctaaggcagctaagaaagctgaccgtgttgctgcagaaggtttgactggtgtttatgttaacggtaatgttgcagcagttattgaagtaaacgctgaaactgacttcgttgcaaaaaacgctcaattcgttgaattggtaaatactacagctaaagtcattgctgaaggaaaacctgctaacaacgaagaagctcttgctttgataatgccttcaggtgaaactcttgaagctgcatacgtatctgcaacagcaactatcggagagaaaatctcattccgtcgctttgcattgattgaaaaaacagacgcacaacactttggagcataccaacataacggtggacgtatcggtgttatttcagttgttgaaggtggagacgaagcacttgctaaacaattgtcaatgcacatcgcagcgatgaaaccaacagttctttcttacaaagaattggatgagcaattcgttaaagatgagttggcacaattgaatcacgttatcgaccaagacaacgaaagccgtgcaatggttaataaaccagctcttccacacttgaagtatggatcaaaagctcaattaactgatgatgttattgctcaagctgaagctgacatcaaagctgaattggctgcagaaggcaaaccagaaaaaatctgggacaaaattattccaggtaaaatggatcgcttcatgcttgataacactaaagttgaccaagcttacacacttcttgcacaagtttacatcatggatgacagcaagacagttgaagcataccttgaatcagttaacgcttcggtagttgagtttgctcgctttgaagttggtgaaggtatcgagaaagctgcaaacgacttcgaagctgaagttgcagctacaatggcagcagccttgaataac

SEQ ID NO: 4648 - protein, 346 aa, Streptococcus pneumoniae
  translation elongation factor TS (tsf); Cellular location: cytoplasm; Similar to strain R6 sequence 15903342 (1.E-38)
MAEITAKLVKELREKSGAGVMDAKKALVETDGDIEKAIELLREKGMAKAAKKADRVAAEGLTGVYVNGNVAAVIEVNAETDFVAKNAQFVELVNTTAKVIAEGKPANNEEALALIMPSGETLEAAYVSATATIGEKISFRRFALIEKTDAQHFGAYQHNGGRIGVISVVEGGDEALAKQLSMHIAAMKPTVLSYKELDEQFVKDELAQLNHVIDQDNESRAMVNKPALPHLKYGSKAQLTDDVIAQAEADIKAELAAEGKPEKIWDKIIPGKMDRFMLDNTKVDQAYTLLAQVYIMDDSKTVEAYLESVNASVVEFARFEVGEGIEKAANDFEAEVAATMAAALNN

SEQ ID NO: 4649 - DNA, 861 bp, Streptococcus pneumoniae
ttgatgaattgtgaagcagttgcccttgggtcgttttgcgagttgaagtcaagaagaggaaaaaaacaaaaaggagaaatactcatggcagtaatttcaatgaaacaacttcttgaggctggtgtacactttggtcaccaaactcgtcgctggaatcctaagatggctaagtacatctttactgaacgtaacggaatccacgttatcgacttgcaacaaactgtaaaatacgctgaccaagcatacgacttcatgcgtgatgcagcagctaacgatgcagttgtattgttcgttggtactaagaaacaagcagctgatgcagttgctgaagaagcagtacgttcaggtcaatacttcatcaaccaccgttggttgggtggaactcttacaaactggggaacaatccaaaaacgtatcgctcgtttgaaagaaattaaacgtatggaagaagatggaactttcgaagttcttcctaagaaagaagttgcacttcttaacaaacaacgtgcgcgtcttgaaaaattcttgggcggtatcgaagatatgcctcgtatcccagatgtgatgtacgtagttgacccacataaagagcaaatcgctgttaaagaagctaaaaaattgggaatcccagttgtagcgatggttgacaccaatactgatccagatgatatcgatgtaatcatcccagctaacgatgacgctatccgtgctgttaaattgatcacagctaaattggctgacgctattatcgaaggacgtcaaggtgaggatgcagtagcagttgaagcagaatttgcagctttagaaactcaagcagattcaattgaagaaatcgttgaagttgtagaaggcgacaacgct

SEQ ID NO: 4650 - protein, 287 aa, Streptococcus pneumoniae
  ribosomal protein S2 (rpsB); Cellular location: cytoplasm; Similar to strain R6 sequence 15904061 (e-144)
MMNCEAVALGSFCELKSRRGKKQKGEILMAVISMKQLLEAGVHFGHQTRRWNPKMAKYIFTERNGIHVIDLQQTVKYADQAYDFMRDAAANDAVVLFVGTKKQAADAVAEEAVRSGQYFINHRWLGGTLTNWGTIQKRIARLKEIKRMEEDGTFEVLPKKEVALLNKQRARLEKFLGGIEDMPRIPDVMYVVDPHKEQIAVKEAKKLGIPVVAMVDTNTDPDDIDVIIPANDDAIRAVKLITAKLADAIIEGRQGEDAVAVEAEFAALETQADSIEEIVEVVEGDNA

SEQ ID NO: 4651 - DNA, 1176 bp, Streptococcus pneumoniae
atgaagaaaaaaatcttagcgtcacttttattaagtacagtaatggtttctcaagtagctgttttaacaactgcgcatgcagaaacgactgatgacaaaattgctgctcaagataataaaattagtaacttaacagcacaacaacaagaagcccaaaaacaagttgaccaaattcaggagcaagtatcagctattcaagctgagcagtctaacttgcaagctgaaaatgatagattacaagcagaatctaagaaactcgagggtgagattacagaactttctaaaaacattgtttctcgtaaccaatcgttggaaaaacaagctcgtagtgctcaaacaaatggagccgtaactagctatatcaataccattgtaaactcaaaatcaattacagaagctatttcacgtgttgctgcaatgagtgaaatcgtatctgcaaacaacaaaatgttagaacaacaaaaggcagataaaaaagctatttctgaaaaacaagtagcaaataatgatgctatcaatactgtaattgctaatcaacaaaaattggctgatgatgctcaagcattgactacgaaacaggcagaactaaaagctgctgaattaagtcttgctgctgagaaagcgacagctgaaggggaaaaagcaagtctattagagcaaaaagcagcagctgaggcagaggctcgtgcagctgcggtagcagaagcagcttataaagaaaaacgagctagccaacaacaatcagtacttgcttcagcaaacactaacttaacagctcaagtgcaagcagtatctgaatctgcagcagcacctgtccgtgcaaaagttcgtccaacatacagtacaaacgcttcaagttatccaattggagaatgtacatggggagtaaaaacattggcaccttgggctggagactactggggtaatggagcacagtgggctacaagtgcagcagcagcaggtttccgtacaggttcaacacctcaagttggagcaattgcatgttggaatgatggtggatatggtcacgtagcggttgttacagctgttgaatcaacaacacgtatccaagtatcagaatcaaattatgcaggtaatcgtacaattggaaatcaccgtggatggttcaatccaacaacaacttctgaaggttttgttacatatatttatgcagat

SEQ ID NO: 4652 - protein, 392 aa, Streptococcus pneumoniae
  secreted 45 kd protein (usp45); Cellular location: outside; Similar to strain R6 sequence 15904062 (0.E+01)
MKKKILASLLLSTVMVSQVAVLTTAHAETTDDKIAAQDNKISNLTAQQQEAQKQVDQIQEQVSAIQAEQSNLQAENDRLQAESKKLEGEITELSKNIVSRNQSLEKQARSAQTNGAVTSYINTIVNSKSITEAISRVAAMSEIVSANNKMLEQQKADKKAISEKQVANNDAINTVIANQQKLADDAQALTTKQAELKAAELSLAAEKATAEGEKASLLEQKAAAEAEARAAAVAEAAYKEKRASQQQSVLASANTNLTAQVQAVSESAAAPVRAKVRPTYSTNASSYPIGECTWGVKTLAPWAGDYWGNGAQWATSAAAAGFRTGSTPQVGAIACWNDGGYGHVAVVTAVESTTRIQVSESNYAGNRTIGNHRGWFNPTTTSEGFVTYIYAD

SEQ ID NO: 4653 - DNA, 492 bp, Streptococcus pneumoniae
atgagacagttgaagcgagttggagtatttttattgcttcctttctttgttctaattgacgcccatattagccagcttctgggctcatttttcccccatgtacatttggctagtcattttctttttctatttctcttatttgagacgatagaagtatcagagtatctctacctagtctattgttttgttataggcttggtttatgatgtttactttttccatctaatagggattacaactctcttatttatcttattgggagccttccttcataaattgaatagtgttattttgttgaatcgttggacaagaatgctagctatgattgtgctgacattcctgtttgaaatgggtagttatcttttggcttttatggtagggttgacagtagatagcatgtcgatttttatagtctatagcttggtaccgacgatgattttaaattttttatggattactgtttttcaatttatttttgaaaaatattatcta

SEQ ID NO: 4654 - protein, 164 aa, Streptococcus pneumoniae
  rod shpae-determining protein MreD, putative; Cellular location: membrane; Similar to strain R6 sequence 15904063 (4.E-91)
MRQLKRVGVFLLLPFFVLIDAHISQLLGSFFPHVHLASHFLFLFLLFETIEVSEYLYLVYCFVIGLVYDVYFFHLIGITTLLFILLGAFLHKLNSVILLNRWTRMLAMIVLTFLFEMGSYLLAFMVGLTVDSMSIFIVYSLVPTMILNFLWITVFQFIFEKYYL

SEQ ID NO: 4655 - DNA, 816 bp, Streptococcus pneumoniae
atgaaccgttttaaaaaatcaaaatatgtcattattgtttttgtcactgttctgcttgtgtcagctctcttagcgacgacttattcaagtacaattgtgacaaaattaggagatggaatctcattggttgatagagttgtacaaaaaccttttcagtggtttgattctgtcaaatcagatttggctcatttgacacgaacatataatgaaaatgaaagtttgaagaaacagctttaccaattagaagttaaatcaaatgaggtggaaagtttaaagacagaaaatgaacaactgcgccaattgcttgatatgaagtctaaattgcaagccacaaagactttagcagcagatgttattatgcgttctccggtatcttggaagcaggagttgaccttagatgcaggtagatcaaaaggtgcttctgagaacatgttagctattgcaaatggtggcttgattgggagtgtttcaaaagtagaggagaactctactatagtcaaccttctgacaaatacggaaaatgctgataagatttctgttaaaattcaacatggctctactacaatttatggaattattattggctatgacaaggaaaatgacgttcttaaaattagccaattaaatagtaatagcgatattagtgcgggagataaggtgactactggtggattaggaaactttaacgttgctgatattcctgttggtgaagtggttgccacaacgcatagtacagactatttgacacgagaagtaactgttaaattgagtgcagatactcataatgtagatgtgatagaattagtggggaattca

SEQ ID NO: 4656 - protein, 272 aa, Streptococcus pneumoniae
  rod shape-determining protein MreC (mreC); Cellular location: outside; Similar to strain R6 sequence 15904064 (e-149)
MNRFKKSKYVIIVFVTVLLVSALLATTYSSTIVTKLGDGISLVDRVVQKPFQWFDSVKSDLAHLTRTYNENESLKKQLYQLEVKSNEVESLKTENEQLRQLLDMKSKLQATKTLAADVIMRSPVSWKQELTLDAGRSKGASENMLAIANGGLIGSVSKVEENSTIVNLLTNTENADKISVKIQHGSTTIYGIIIGYDKENDVLKISQLNSNSDISAGDKVTTGGLGNFNVADIPVGEVVATTHSTDYLTREVTVKLSADTHNVDVIELVGNS

SEQ ID NO: 4657 - DNA, 792 bp, Streptococcus pneumoniae
atggatagtatgattttagggcgttatatcccaggggattcgattgttcaccgattggatccacgtagcaaattgcttgctatgatgctactgattttgattgtgttttgggctaataaccccttgacgaatctgattctttttatagcgacagggatatttattgccttgtcaggagtatctctttcattttttattcagggcttgaagtctatgtttttcttgattgccttcacaactatttttcaactatttttcatttctaatgggaatgttttatttgagttttcgtttgtgagaatcacggattatgctttgcaacaagctgggattattttttgtcgctttgtattgattattttcttttcaactttgttaaccttaacaaccatgcctttaagtttggcatcagctgtcgaagctttattagcacctttaaagcgtgtgaaagttccagttcatgaaattggattgatgctgtctatgagtttgcgttttgtcccaaccttgatggatgatacgactcggattatgaatgcacagaaagctcgtggagtggattttggagaaggaagcatcgttcaaaaagtaaaggcgatgattcccattttgattcctctttttgcgacaagtttaaaacgtgcagattccttggctatcgctatggaagcgcgtggctatcagggtggaaaaggcagaagtcaataccgacaattgaaatggactctaaaggatacgctgaccattcttgttattctcgtacttggttgttgtttatttttcttaaaatct

SEQ ID NO: 4658 - protein, 264 aa, Streptococcus pneumoniae
  conserved hypothetical protein (ABC transporter); Cellular location: membrane; Similar to strain R6 sequence 15904065 (e-145)
MDSMILGRYIPGDSIVHRLDPRSKLLAMMLLILIVFWANNPLTNLILFIATGIFIALSGVSLSFFIQGLKSMFFLIAFTTIFQLFFISNGNVLFEFSFVRITDYALQQAGIIFCRFVLIIFFSTLLTLTTMPLSLASAVEALLAPLKRVKVPVHEIGLMLSMSLRFVPTLMDDTTRIMNAQKARGVDFGEGSIVQKVKAMIPILIPLFATSLKRADSLAIAMEARGYQGGKGRSQYRQLKWTLKDTLTILVILVLGCCLFFLKS

SEQ ID NO: 4659 - DNA, 837 bp, Streptococcus pneumoniae
atgggaattgctctagaaaatgtgaattttacatatcaagaaggtactcccttagcttcagcagctttgtcggatgtttctttgacgattgaagatggctcttatacagctttaattgggcacacaggtagtggtaaatcaactattttacaactcttaaatggtttattggtgccaagtcaagggagtgtgagggtttttgataccttaatcacctcgacttctaaaaataaagatattcgtcaaattagaaaacaggttggcttggtatttcagtttgctgaaaatcagatttttgaagaaacggttttgaaggacgttgcttttggaccgcaaaattttggagtttctgaagaagatgctgtgaagactgcgcgtgagaaactggctctggttggaattgatgaatcactttttgatcgtagtccgtttgagctgtcagggggacaaatgagacgtgttgccattgcaggcatacttgccatggagccagctatattagtcttagatgagccaacagctggtctagatcctctagggagaaaagagttgatgaccctgttcaaaaaactccaccagtcagggatgaccatcgtcttggtaacgcatttgatggatgatgttgctgaatatgcgaatcaagtctatgtaatggaaaagggacgtttagtaaaggggggcaaaccaagtgatgtctttcaagacgttgtttttatggaagaagttcagttgggagtacctaaaattacggccttttgtaaacgattggctgatagaggcgtgtcatttaaacgattaccgattaagatagaggagttcaaggagtcgctaaatgga

SEQ ID NO: 4660 - protein, 279 aa, Streptococcus pneumoniae
  ABC transporter, ATP-binding protein; Cellular location: membrane; Similar to strain R6 sequence 15904066 (e-154)
MGIALENVNFTYQEGTPLASAALSDVSLTIEDGSYTALIGHTGSGKSTILQLLNGLLVPSQGSVRVFDTLITSTSKNKDIRQIRKQVGLVFQFAENQIFEETVLKDVAFGPQNFGVSEEDAVKTAREKLALVGIDESLFDRSPFELSGGQMRRVAIAGILAMEPAILVLDEPTAGLDPLGRKELMTLFKKLHQSGMTIVLVTHLMDDVAEYANQVYVMEKGRLVKGGKPSDVFQDVVFMEEVQLGVPKITAFCKRLADRGVSFKRLPIKIEEFKESLNG

SEQ ID NO: 4661 - DNA, 825 bp, Streptococcus pneumoniae
atgaaatcaataattgatgtaaaaaatctttcttttcgctataaagaaaatcagaactactacgatgtgaaggatattacgtttcacgtgaaacgtggagaatggctttcgattgtagggcataatggtagtggtaaatcaacgacggttcgattaattgatggcttactggaagcagaatccggagagattgtaattgatggccaacgtttgactgaggaaaatgtttggaatatacgtcgtcaaatcggtatggtttttcaaaatccagacaatcaatttgttggagcgactgttgaagatgatgttgcttttggtttggaaaatcagggactttctcgtcaagaaatgaaaaagagagtggaagaagctctggctttagttggcatgttggactttaaaaagagagagccagcgcgtctatcaggtggccaaaagcaacgtgtggccattgcaggtgttgtagccctaagaccagctattttaatcttagatgaagcaacgagtatgttggatcctgaggggcgtagagaacttattgggacagtaaaaggaattcgaaaagactatgatatgacggtcatttctattacccatgatttggaagaagtcgccatgagtgatcgcgtattggtcatgaaaaaaggggaaattgaatcaactagtagtccaagggagcttttctctcgaaatgatttagatcaaattggattagacgatccttttgctaatcaattaaaaaaatctttgagccagaatggctatgatttacctgaaaattatttgacagaaagtgagctagaggataagctatgggaattgctc

SEQ ID NO: 4662 - protein, 275 aa, Streptococcus pneumoniae
  ABC transporter, ATP-binding protein; Cellular location: membrane; Similar to strain R6 sequence 15904067 (e-155)
MKSIIDVKNLSFRYKENQNYYDVKDITFHVKRGEWLSIVGHNGSGKSTTVRLIDGLLEAESGEIVIDGQRLTEENVWNIRRQIGMVFQNPDNQFVGATVEDDVAFGLENQGLSRQEMKKRVEEALALVGMLDFKKREPARLSGGQKQRVAIAGVVALRPAILILDEATSMLDPEGRRELIGTVKGIRKDYDMTVISITHDLEEVAMSDRVLVMKKGEIESTSSPRELFSRNDLDQIGLDDPFANQLKKSLSQNGYDLPENYLTESELEDKLWELL

SEQ ID NO: 4663 - DNA, 543 bp, Streptococcus pneumoniae
atgaaaaaagaacaaattcccaatctcttaacaataggtcgaattctctttatacctatttttatctttattttaacgataggaaattcgatagagagtcatatagttgcagctattatctttgctgttgccagtattaccgactatttagatggatatttagctcgtaaatggaatgtggtcagtaattttggtaaatttgcagatcctatggcggataagttactagttatgtcggcttttattatgttgattgagttaggtatggctccggcttggattgttgcagtgattatctgtcgtgagttagctgtgacaggtttaaggcttttattggttgaaactggtggaacaattttagcagcagcaatgcctggaaaaattaaaacttttagtcagatgtttgccattattttcttgctattacattggactttgcttggtcaagttctactttatgtagccttatttttcactatctactctggctatgactatttcaagggtagtgcctatgtatttaaagggacatttggttcgaaa

SEQ ID NO: 4664 - protein, 181 aa, Streptococcus pneumoniae
  CDP-diacylglycerol--glycerol-3-phosphate 3-phosphatidyltransferase (pgs; Cellular location: membrane; Similar to strain R6 sequence 15904068 (1.E-99)
MKKEQIPNLLTIGRILFIPIFIFILTIGNSIESHIVAAIIFAVASITDYLDGYLARKWNVVSNFGKFADPMADKLLVMSAFIMLIELGMAPAWIVAVIICRELAVTGLRLLLVETGGTILAAAMPGKIKTFSQMFAIIFLLLHWTLLGQVLLYVALFFTIYSGYDYFKGSAYVFKGTFGSK

SEQ ID NO: 4665 - DNA, 828 bp, Streptococcus pneumoniae
atgacaagtatgagaaaaaaaacaattggagaggttttacgattagctagaatcaatcagggattgagtttagatgaattgcagaaaaagacagaaatccagttagatatgttggaagcaatggaagcagacgatttcgatcaacttccaagtcctttttacacgcgttctttcttgaaaaaatatgcatgggctgttgagttagatgaccaaattgttttggatgcttatgattctgggagtatgattacttatgaggaagtagatgttgatgaagatgagttgacaggtcgtagacgttcaagtaagaaaaagaagaaaaaaacatcatttttacctttattttattttatcctttttgctttatcgattttaatttttgtgacttattatgtttggaactatattcaaactcaaccagaggagccttctctttctaattacagtgtggttcaatcaacaagttcaactagctctgttccccactcctcaagtagtagttcttctagtatagaatcagctataagtgtatcaggcgaaggaaatcatgtagaaatcgcttataagacaagtaaggaaacagttaaattgcaattggcagtttcagatgttacaagttgggtcagtgtttcagaaagcgaacttgagggcggtgtaaccttatcgccaaagaagaaaagtgcagaagcaacagttgcaactaaaagtcctgtaacaattacgttaggtgttgtaaaaggtgttgatttgacagtagataatcagactgttgatttatcgaaattaacagctcagactggacaaatcactgtaacctttactaaaaat

SEQ ID NO: 4666 - protein, 276 aa, Streptococcus pneumoniae
  conserved hypothetical protein; Cellular location: membrane; Similar to strain R6 sequence 15904069 (e-152)
MTSMRKKTIGEVLRLARINQGLSLDELQKKTEIQLDMLEAMEADDFDQLPSPFYTRSFLKKYAWAVELDDQIVLDAYDSGSMITYEEVDVDEDELTGRRRSSKKKKKKTSFLPLFYFILFALSILIFVTYYVWNYIQTQPEEPSLSNYSVVQSTSSTSSVPHSSSSSSSSIESAISVSGEGNHVEIAYKTSKETVKLQLAVSDVTSWVSVSESELEGGVTLSPKKKSAEATVATKSPVTITLGVVKGVDLTVDNQTVDLSKLTAQTGQITVTFTKN

SEQ ID NO: 4667 - DNA, 1281 bp, Streptococcus pneumoniae
atgacaaaggttgtttttgaagaaaaatactatccagctgtaaaagaaatggtttatcgaactcgtttggccaacggattgacagttgctcttttgcctaaaaaggaatttaaagaggtttacgggagtgtcactgtacagtttggttcggtagatacgtttgtcacagaagttgacggagatgtaaaacaatatcctggaggaattgctcattttcttgaacataaattatttgagagagaagattctagtgatttgatgtcggcttttacgagtctaggtgcagatagtaatgcctttacaagctttacaaaaacaaactatcttttttcagcaacggattattttttagaaaatttagatttacttgatgaattggtaacatcagcacactttactgaagcttccattctgacagagcaggatattattcagcaagaacgagaaatgtaccaagatgatccagattcgtgtttattcttttcaactttagcgaatttgtatcctggtacacctttagcaactgatatagttggaagtgaggagtccatttcccaaatcaatctaactaatttgcaagaaaattttacaaagttttacaaacctgtaaacatgtctctgtttttagttggtaattttgatgtggagcgagtacaggactattttgaaagcaaagaactgaaagattcagattttcaggaagtagcaagagaaaagttgtttttacagcctgtaaagccaacagatagtatgagaatggaagtatcttctcccaaactagcgattggagttagaggtaagcgagaagtttctgaagcggattgctatcgacatcatattttattaaaattattgtttgcaatgatgtttggttggacttcggatcgttttcaaaaatgttatgaatcaggtaaaattgatgcgtccttatctctggaagttgaaataacaagtcgctttcattttgtcatgttgacaatggatacgaaagagccagttgctttgtctcatcaatttaggaaggctattcgtaattttacaaaggatttagatattacagaggaacatttagatattatcaaaagagagatgtttggcgaatttttcagtagcatgaactctcttgaatttattgcaacgcaatatgatgcttttgaaaatggtgagataatttttgatttgccgaaaattttacaggaaattactttagaggatgtccttgatgctggacatcatttaatagatgatggtgacatagttgattttacaatattcccatcg

SEQ ID NO: 4668 - protein, 427 aa, Streptococcus pneumoniae
  peptidase, M16 family; Cellular location: cytoplasm; Similar to strain R6 sequence 15904070 (0.E+01)
MTKVVFEEKYYPAVKEMVYRTRLANGLTVALLPKKEFKEVYGSVTVQFGSVDTFVTEVDGDVKQYPGGIAHFLEHKLFEREDSSDLMSAFTSLGADSNAFTSFTKTNYLFSATDYFLENLDLLDELVTSAHFTEASILTEQDIIQQEREMYQDDPDSCLFFSTLANLYPGTPLATDIVGSEESISQINLTNLQENFTKFYKPVNMSLFLVGNFDVERVQDYFESKELKDSDFQEVAREKLFLQPVKPTDSMRMEVSSPKLAIGVRGKREVSEADCYRHHILLKLLFAMMFGWTSDRFQKCYESGKIDASLSLEVEITSRFHFVMLTMDTKEPVALSHQFRKAIRNFTKDLDITEEHLDIIKREMFGEFFSSMNSLEFIATQYDAFENGEIIFDLPKILQEITLEDVLDAGHHLIDDGDIVDFTIFPS

SEQ ID NO: 4669 - DNA, 1248 bp, Streptococcus pneumoniae
atggagttagtgcatggaatttcaacacattttatccaatcaaaaaagtttaaaacaaacaaaattaccgtgcgttttaccgctccattatcccttgatacgattgcaggtcacatgttgagtgcaagtatgctagagactgctaatcagatgtaccccacttctcaagatttgaggagacacttggccagtctatacggtacagatatgtcaaccaattgtttcagaagagggcaaagccacattatagaattgacatttacctatgttcgtgatgagtttttaagtaggaaaaacgtgctaacctctcagattttggaacttgtaaaagaaactcttttttcacccgtagtagttgataatgggtttgatccggccttatttgaaattgagaaaaaacaattgctagcaagtttagcagctgatatggatgattctttttattttgcacataaagaattggataaattgttttttcatgatgaacgtcttcaattggaatatagtgatttacgaaatcgtattttagctgaaactccacaaagttcttattcttgtttccaagaatttttagccaatgatcgaatagatttctttttcctaggtgattttaatgaggttgaaattcaaaatgtattagaatcatttggctttaaaggtcgaaaaggagatgtgaaggttcagtattgtcaaccttattctaatatccttcaggaaggtatggttcggaaaaatgtgggacaatccattttggaattaggttatcattactgttctaaatatggtgatgagcaacatttacccatgattgtaatgaatggtttacttggtggatttgctcactctaagctctttacaaatgtccgtgaaaatgctggattagcttataccatttcaagtgagcttgatttatttagtggattcttgaggatgtatgctggtatcaatcgagaaaatcgtaaccaggctcgtaaaatgatgaataatcaactgcttgatttaaaaaaaggttattttacagagtttgagttaaatcagaccaaggaaatgattcgttggtcgttgttactttctcaagataatcaatcttcattgattgaacgtgcttatcaaaatgccttatttggaaaatcttcagcagactttaaaagttggattgcaaagcttgaacaaattgacaaagatgctatttgtagagtagctaataatgtgaaactacaagcgatttactttatggaaggaatagaa

SEQ ID NO: 4670 - protein, 416 aa, Streptococcus pneumoniae
  conserved hypothetical protein; Cellular location: cytoplasm; Similar to strain R6 sequence 15904071 (0.E+01)
MELVHGISTHFIQSKKFKTNKITVRFTAPLSLDTIAGHMLSASMLETANQMYPTSQDLRRHLASLYGTDMSTNCFRRGQSHIIELTFTYVRDEFLSRKNVLTSQILELVKETLFSPVVVDNGFDPALFEIEKKQLLASLAADMDDSFYFAHKELDKLFFHDERLQLEYSDLRNRILAETPQSSYSCFQEFLANDRIDFFFLGDFNEVEIQNVLESFGFKGRKGDVKVQYCQPYSNILQEGMVRKNVGQSILELGYHYCSKYGDEQHLPMIVMNGLLGGFAHSKLFTNVRENAGLAYTISSELDLFSGFLRMYAGINRENRNQARKMMNNQLLDLKKGYFTEFELNQTKEMIRWSLLLSQDNQSSLIERAYQNALFGKSSADFKSWIAKLEQIDKDAICRVANNVKLQAIYFMEGIE

SEQ ID NO: 4671 - DNA, 366 bp, Streptococcus pneumoniae
atggaatacaaattatttgaagaatttattaccctccaagcactattcaaagaacttggaattacacatagcggaggagctattaaatcatttctctctgaacattctgtttactttaatagggaattagagagccgtcgtggaaaaaaacttcgtattggcgataaagttgacatccctgacatgaacattgacatcttgttgacacaacctacttctgaagaacaagatgaataccaagctgataaagttgaaaaagaacggatcgctaaacttgtcaaaaagatgaataagggagttaaaaaagacaaatcgaaacctgcttcatcacctaaaagccaacaagctccacgattccctggtaga

SEQ ID NO: 4672 - protein, 122 aa, Streptococcus pneumoniae
  conserved hypothetical protein; Cellular location: cytoplasm; Similar to strain R6 sequence 15904072 (2.E-65)
MEYKLFEEFITLQALFKELGITHSGGAIKSFLSEHSVYFNRELESRRGKKLRIGDKVDIPDMNIDILLTQPTSEEQDEYQADKVEKERIAKLVKKMNKGVKKDKSKPASSPKSQQAPRFPGR

SEQ ID NO: 4673 - DNA, 1095 bp, Streptococcus pneumoniae
atgtggctacaacatctatctctcaagacttttcgtaattacaaagaaacgaaaatagactttaatcctaaattgaatgtctttttgggacgtaatgcacaaggaaaaacaaacatgttagaggctatctattttttagccttaacgcgtagtcatcgaactcgaacagataaaaatctcattcattttgatgaggaacaacttcatctttcaggtctcgttcagaaaaaaactggatccattcccctagaaatcgaactaacacaaaaaggtcgtgtaacaaaagttaatcacttaaaacaggcacgcctttcagattatgtaggacacatgaatgttgtcttatttgctcctgaagatttacaactaattaaaggagcaccttcgattcgacgaaaattcattgatatggaacttgggcaaattaagccaatctatttatctgacttaaccaattataaccacatcctaaagcaaagaaacacttacctaaaatcagctcaaaaaatagatgaaacattcctttctgtgttagatgatcagctagttgattatggatgtcgtgtaatgaatcaccgcttagatttcataaaaaaactagaatcatttgggcgtaagaaacattttgaactctctaatcagatcgaagagttgtcaatatcctatcaatcttctgtcaatataactgacaaacaaaacttatccgaatctttcaaaattgctttagaaaaaagtagatccagagatttatttaaaaagaatactggtgtcggtcctcatcgagatgacatttctttttatataaatgggatggatgctagtttcggaagccaaggtcaacatcgtagtctcgtcctctcgataaaattagcagaaatcgaattaatggaaagcattaccacagaatctcctatattactgcttgacgatgtgatgagtgaacttgacaacactagacagttaaaattattagaaacgatttctcaatcaatccaaacctttatcacaacaacaagcttagaccatcttcaaaatctgccagaaaatctaagtatcttcactattcaggatggtaaagctgctgtaaatggaaat

SEQ ID NO: 4674 - protein, 365 aa, Streptococcus pneumoniae
  recF protein (recF); Cellular location: cytoplasm; Similar to strain R6 sequence 15904073 (0.E+01)
MWLQHLSLKTFRNYKETKIDFNPKLNVFLGRNAQGKTNMLEAIYFLALTRSHRTRTDKNLIHFDEEQLHLSGLVQKKTGSIPLEIELTQKGRVTKVNHLKQARLSDYVGHMNVVLFAPEDLQLIKGAPSIRRKFIDMELGQIKPIYLSDLTNYNHILKQRNTYLKSAQKIDETFLSVLDDQLVDYGCRVMNHRLDFIKKLESFGRKKHFELSNQIEELSISYQSSVNITDKQNLSESFKIALEKSRSRDLFKKNTGVGPHRDDISFYINGMDASFGSQGQHRSLVLSIKLAEIELMESITTESPILLLDDVMSELDNTRQLKLLETISQSIQTFITTTSLDHLQNLPENLSIFTIQDGKAAVNGN

SEQ ID NO: 4675 - DNA, 1476 bp, Streptococcus pneumoniae
atgtctaattgggacactaaatttttgaaaaaaggttttacctttgatgatgtattgcttattccagctgaaagtcatgtgttgcctaacgatgcagatttaacaactaaattggcagataatttgactttaaatatcccaattattaccgctgccatggacacagttacagagagtcaaatggccattgctattgctcgtgcaggcggtctcggagttatccataaaaacatgtcaattgctcaacaagcagacgaggttcgtaaggtaaaacgttctgaaaatggagttattattgatccgttcttcttgacgcctgaacatacaattgctgaagcagatgagcttatgggtcgttaccgcatcagtggtgttccagttgttgaaacacttgaaaatcgtaaattggttggtattttgacaaaccgagatcttcgttttatttcagattataatcaaccaatttcaaaccatatgactagtgaaaatcttgttactgctcctgtgggtacggatcttgcaacggctgagagtattcttcaagagcatcgtattgaaaaacttccgttggtcgatgaagaaggcagtctttctggtttgatcactatcaaagatattgaaaaagttattgagtttccaaatgcggctaaagatgagtttggtcgtcttctagttgcaggtgcagtaggtgttacttcagatacatttgaacgtgcagaggctctttttgaggcaggagcggatgcgattgttattgatactgcacatggtcattctgcaggtgtcttgcgtaaaattgccgagattcgtgctcatttcccagatcggactttgattgctggaaatattgctactgctgaaggtgcacgtgccctttatgaagcgggtgtagacgttgttaaggttggtattggaccaggttctatctgtactactcgtgtgattgctggtgttggtgttccgcaagtaacagctatctacgatgctgcagctgttgcgcgcgaatatggtaaaacgattattgctgacggtgggatcaagtattctggagatattgtaaaagcacttgctgcaggtggaaatgctgttatgcttggatctatgtttgctggaactgatgaagctccaggcgaaactgaaatcttccaaggacgtaaattcaagacttaccgtggtatgggatcaattgctgctatgaagaaaggttcaagcgaccgttatttccaaggttctgtcaatgaagcaaacaagcttgttccagaaggaattgaaggtcgtgttgcttataaaggagcggcagctgatattgttttccaaatgattggtggtattcgctctggtatgggttactgtggtgcagctaaccttaaagaactacacgataatgctcaatttattgaaatgtctggtgctggtttgaaagaaagccatcctcatgatgtgcaaattactaatgaggcaccaaattattctatg

SEQ ID NO: 4676 - protein, 492 aa, Streptococcus pneumoniae
  inosine-5'-monophosphate dehydrogenase (guaB); Cellular location: cytoplasm; Similar to strain R6 sequence 15904074 (0.E+01)
MSNWDTKFLKKGFTFDDVLLIPAESHVLPNDADLTTKLADNLTLNIPIITAAMDTVTESQMAIAIARAGGLGVIHKNMSIAQQADEVRKVKRSENGVIIDPFFLTPEHTIAEADELMGRYRISGVPVVETLENRKLVGILTNRDLRFISDYNQPISNHMTSENLVTAPVGTDLATAESILQEHRIEKLPLVDEEGSLSGLITIKDIEKVIEFPNAAKDEFGRLLVAGAVGVTSDTFERAEALFEAGADAIVIDTAHGHSAGVLRKIAEIRAHFPDRTLIAGNIATAEGARALYEAGVDVVKVGIGPGSICTTRVIAGVGVPQVTAIYDAAAVAREYGKTIIADGGIKYSGDIVKALAAGGNAVMLGSMFAGTDEAPGETEIFQGRKFKTYRGMGSIAAMKKGSSDRYFQGSVNEANKLVPEGIEGRVAYKGAAADIVFQMIGGIRSGMGYCGAANLKELHDNAQFIEMSGAGLKESHPHDVQITNEAPNYSM

SEQ ID NO: 4677 - DNA, 1023 bp, Streptococcus pneumoniae
atgactaaacccattattttaacaggagaccgtccaacaggaaaattgcatattggacattatgttggaagtctcaaaaatcgagtattattacaggaagaggataagtatgatatgtttgtgttcttggctgaccaacaagccttgacagatcatgccaaagatcctcaaaccattgtagagtctatcggaaatgtggctttggattatcttgcagttggattggatccaaataagtcaactatttttattcaaagccagattccagagttggctgagttgtctatgtattatatgaatctagtttcgttagcacgtttggagcgaaatccaacagtcaagacagagatttctcagaaaggatttggagaaagcattccgacaggattcttggtctatccaatcgctcaagcagctgatatcacagctttcaaggctaattatgttcctgttgggacagatcagaaaccaatgattgagcaaactcgtgaaattgttcgttcttttaacaatgcatataactgtgatgtcttggtagagccggaaggtatttatccagaaaatgagagagcagggcgtttgcctggtttagatggaaatgctaaaatgtctaaatcactaaataatggtatttatttagctgatgatgcggatactttgcgtaaaaaagtaatgagtatgtatacagatccagatcatatccgcgttgaggatccaggtaagattgagggaaatatggttttccattatctagatgtttttggtcgtccagaagatgctcaagaaattgctgatatgaaagaacgttatcaacgaggtggtcttggtgatgtgaagaccaagcgttatctacttgaaatattagaacgtgaactgggtcctattcgtgagcgccgtattgaatttgctaaggatatgggagaagtttataatatgattcaaaaaggtagtgaaagagcgcgtgaagttgcgggtcaaaccctatctgaggtaaaaggggcaatgggacttcattactttaac

SEQ ID NO: 4678 - protein, 341 aa, Streptococcus pneumoniae
  tryptophanyl-tRNA synthetase (trps); Cellular location: cytoplasm; Similar to strain R6 sequence 15904075 (0.E+01)
MTKPIILTGDRPTGKLHIGHYVGSLKNRVLLQEEDKYDMFVFLADQQALTDHAKDPQTIVESIGNVALDYLAVGLDPNKSTIFIQSQIPELAELSMYYMNLVSLARLERNPTVKTEISQKGFGESIPTGFLVYPIAQAADITAFKANYVPVGTDQKPMIEQTREIVRSFNNAYNCDVLVEPEGIYPENERAGRLPGLDGNAKMSKSLNNGIYLADDADTLRKKVMSMYTDPDHIRVEDPGKIEGNMVFHYLDVFGRPEDAQEIADMKERYQRGGLGDVKTKRYLLEILERELGPIRERRIEFAKDMGEVYNMIQKGSERAREVAGQTLSEVKGAMGLHYFN

SEQ ID NO: 4679 - DNA, 1620 bp, Streptococcus pneumoniae
ttgcttacagtatctgatgtttcactacgttttagtgatcgcaaactttttgatgatgtcaatatcaaatttacagaaggaaatacttacggattaatcggtgctaatggtgccggaaaatcaacctttttaaaaattttagctggagatatcgaacctactactggtcacatctctcttggtccagatgaacgtctctctgttcttcgtcaaaatcactttgactacgaagatgaacgtgccattgatgtcgttatcatgggaaatgaaaaactttatagcatcatgaaagagaaagatgctatctacatgaaggaagatttctcagacgaggacggggttcgtgctgccgaactcgaaggagagtttgccgaacttggaggttgggaagcagagagtgaagcctctcaactacttcaaaacctaaacattccagaagaattacactaccaaaacatgagcgaattggccaacggtgaaaaagtaaaggttctcctcgccaaagcactttttggtaaaccagatgttcttctcttggacgagcctactaacggtttggatatccaatcgattacttggttagaagacttcttgattgactttgataacacagttatcgtagtatcccacgaccgtcacttcttaaacaaagtttgtactcacatggccgaccttgactttggaaaaatcaaactctatgtcggaaactacgacttctggaaggaatcttctgagcttgctgctaaattgctagcagaccgtaatgctaaagcagaagaaaaaattaaacaattgcaagaatttgttgctcgtttctctgccaatgcttctaagtcaaggcaggcaacatcacgtaagaaaatgcttgataagattgagctagaagagattgtgccatctagtcgtaaatatccatttatcaactttaaagcggaacgtgagattggtaatgatctcttgacagtagaaaatttaactgtaaagattgatggtgaaactatcttggataatattagtttcatcttgcgtccagatgataagacagcacttattggacaaaatgatattcaaacgactgcattaattcgtgcaatcatgggagatattgactatgaaggaactgtcaagtggggagttacaactagtcaatcttacctaccaaaagataactcagctgattttgcaggaggagaatcaattcttgactggttgcgtcaattcgcaagtaaagaagaagatgacaatactttcctacgtggcttcctcggccgtatgctcttctctggagatgaagttaacaaacctgtaaatgtcttgtcagggggagaaaaagttcgtgtcatgctttcaaaactcatgctcttaaaatcaaatgtccttgtacttgatgatccaacaaatcacttggacttggaatctatctcaagcttgaatgatggattgaaaaactttaaagaatcaatcatctttgccagccatgaccacgaatttattcaaactttggctaaccatatcattgtcttatctaaaaatggcgtcattgaccgtatcgatgaaacctacgatgaattcctagaaaatgcagaagtacaagcaaaagttaaagaactttggaaagac

SEQ ID NO: 4680 - protein, 540 aa, Streptococcus pneumoniae
  ABC transporter, ATP-binding protein; Cellular location: cytoplasm; Similar to strain R6 sequence 15904076 (0.E+01)
MLTVSDVSLRFSDRKLFDDVNIKFTEGNTYGLIGANGAGKSTFLKILAGDIEPTTGHISLGPDERLSVLRQNHFDYEDERAIDVVIMGNEKLYSIMKEKDAIYMKEDFSDEDGVRAAELEGEFAELGGWEAESEASQLLQNLNIPEELHYQNMSELANGEKVKVLLAKALFGKPDVLLLDEPTNGLDIQSITWLEDFLIDFDNTVIVVSHDRHFLNKVCTHMADLDFGKIKLYVGNYDFWKESSELAAKLLADRNAKAEEKIKQLQEFVARFSANASKSRQATSRKKMLDKIELEEIVPSSRKYPFINFKAEREIGNDLLTVENLTVKIDGETILDNISFILRPDDKTALIGQNDIQTTALIRAIMGDIDYEGTVKWGVTTSQSYLPKDNSADFAGGESILDWLRQFASKEEDDNTFLRGFLGRMLFSGDEVNKPVNVLSGGEKVRVMLSKLMLLKSNVLVLDDPTNHLDLESISSLNDGLKNFKESIIFASHDHEFIQTLANHIIVLSKNGVIDRIDETYDEFLENAEVQAKVKELWKD

SEQ ID NO: 4681 - DNA, 2550 bp, Streptococcus pneumoniae
atgaaatcatttttaaaaacatatcgaacctattttatttctttcatcattcctgtagtgattatgtctggagtatatctatctcaaagtatctactggaatagcgacaactctcctctattaggagatggctttcatcaatacgttatttttgatgtagccttacgaaatatcctacatggaaatagtaatctgttttacacctttacaagtggtctagggctaaacttctatgccctatctagttattacttgggtagttttctcgcgcctctggtttacttttttgatctaacgaatatgccagatgctatctatctgacaactctcttaaaatttggattgattggtctgtcaaccttttttagtttgaataaattgtttcaatctatccctcagattttaaaactagccttatctacttcctatgctctgatgagtttcactgtcagtcaattagagataaaaacctggctagatgtttttatcttgattcctttaattataactggtttacatctactgataactgaaaagaaactcctattgtactttacaagtctgtcaatcttatttattcaaaattattattttggatatatgacagtattgtttcttattttctggtatctctgtcaaatttcgtgggactttaagactcgaaaatcatctgttcttgatttcatagttatctcctttttagctggtatggctagtttgattatgactcttcccactctatttgatttacagacacatggggaaaaattgactgaagttacaaagtttcaaactgaaagtagctggtatcttgatctctttgctaagcaattcattggttcctttgacacaacaaagtatggggccatcccaatgatttttgttggactatttccctttattttgaccattttattttttacgctgaaatctattaagtttcacgtgaaactcatatatgtaatattctttgcatttctaattgcaagcttttacatagaagctcttgacttattttggcaaggcatgcatactccaaacatgtttttacatcgctatgcttggattttctctaccttgttaatttacacagcagcagaagtcttaaagcgtctgaaagaacttaaagtctggaattttttagtttcgctttttcttgtagtagcaggatttttagctaccatctatctaaaatcgcattattcttttttaacagatttgaatattctgcttactcttgaatttttggttgtctattctcttttactccttgcagttatcaaaaagtttatatctgtgaatctatttgccattctaatctctttatttatactggttgaaatgagtttaaatgcttcatctcaaatggacggaattgctaaggaatggggatttgcttctcgaagtgcttatagtcgagatatcccagctatggaatctttctcaacatatattggaaatcaatttactcgtactgaaaaactacaaactcagacaggaaatgacagtatgaaattcaactacaatggaatctctcaattttcatctgttcgaaatcgttcatcaagctctactttagataaacttggttttaaatcctctgggactaatctcaatctccgatatgcaaataatagtattttggctgatagtttatttggtatccagtacaatatctcagacagtcctattgataagtatggctttaaagatatctatcaaaaagataatcttaccctatatgaaaatcaatactctcttccgattgcagttgcgagtcaatctgtttacaatgatgtcaagttcaatgaacataccttggataatcaggcctcatttttaaatcaacttgctaacgtcaattttgattatttttctccaataccttatgaaaaaacagaaaaaatagaaaatactaatgatttgattagtgtcacaagttcttcaaatgaagatgcagcaatccagtatcaaattgaagttccagaaaacagccaagtttatctctctttcataaaccttcacttttctaacgataaacaaaagaaggttgacatccttgtaaatggtgaaaaaaagacttttacaactgataatgtcttctccttctttaatctaggatatactaaagagaaaaaaactttcaatatcaatgttagtttccctggaaattcacaagtatcatttgaatctcctaccttctatcgtttagataccaaaactttcaccgaggcaattcaaaaaattaaagaacaacctgtcacagtatcaacttctaaaaacaaggtttttgctacatatgatgtccaacaagatacatctattttcttcaccattccttatgacaaaggttggtctgcctaccaagatggtaagaaaatagaaattaaacaagctcaaactggatttatgaaagttgacattcccaaggggaaaggaactattacactttccttcattcccaatggttttattactggagcaatctgttcctttacttctctcttactatttggaatctataatcacagacgaaagtcatctaaggca

SEQ ID NO: 4682 - protein, 850 aa, Streptococcus pneumoniae
  ABC transporter, permease protein, putative; Cellular location: membrane; Similar to strain R6 sequence 15904077 (0.E+01)
MKSFLKTYRTYFISFIIPVVIMSGVYLSQSIYWNSDNSPLLGDGFHQYVIFDVALRNILHGNSNLFYTFTSGLGLNFYALSSYYLGSFLAPLVYFFDLTNMPDAIYLTTLLKFGLIGLSTFFSLNKLFQSIPQILKLALSTSYALMSFTVSQLEIKTWLDVFILIPLIITGLHLLITEKKLLLYFTSLSILFIQNYYFGYMTVLFLIFWYLCQISWDFKTRKSSVLDFIVISFLAGMASLIMTLPTLFDLQTHGEKLTEVTKFQTESSWYLDLFAKQFIGSFDTTKYGAIPMIFVGLFPFILTILFFTLKSIKFHVKLIYVIFFAFLIASFYIEALDLFWQGMHTPNMFLHRYAWIFSTLLIYTAAEVLKRLKELKVWNFLVSLFLVVAGFLATIYLKSHYSFLTDLNILLTLEFLVVYSLLLLAVIKKFISVNLFAILISLFILVEMSLNASSQMDGIAKEWGFASRSAYSRDIPAMESFSTYIGNQFTRTEKLQTQTGNDSMKFNYNGISQFSSVRNRSSSSTLDKLGFKSSGTNLNLRYANNSILADSLFGIQYNISDSPIDKYGFKDIYQKDNLTLYENQYSLPIAVASQSVYNDVKFNEHTLDNQASFLNQLANVNFDYFSPIPYEKTEKIENTNDLISVTSSSNEDAAIQYQIEVPENSQVYLSFINLHFSNDKQKKVDILVNGEKKTFTTDNVFSFFNLGYTKEKKTFNINVSFPGNSQVSFESPTFYRLDTKTFTEAIQKIKEQPVTVSTSKNKVFATYDVQQDTSIFFTIPYDKGWSAYQDGKKIEIKQAQTGFMKVDIPKGKGTITLSFIPNGFITGAICSFTSLLLFGIYNHRRKSSKA

SEQ ID NO: 4683 - DNA, 677 bp, Streptococcus pneumoniae
ttggcagatggatctgggaaactagcagaaggtggaacaaagttaacttctggattggaagatttacagacaggacttgcttctttaggacaaggactaggtaatgctagtgatcaactcaaatcagtatcaacagaatctaaaaatgcagagattttgtcaaatccactcaatctttcaaaaacagacaatgatcaagttcctgtaaatggaatcgcaatagctccttatatgatatcagttgctctttttttgcagcaatatcaacaaatatgatatttgcgaaattgccttcaggacgtcatccagagagccgttgggcttggttgaaatcttgagctgaaataaatggtattatagctgttttggcaggaattttggtatatggaggagttcagcttattggtttaactgctaatcatgagatgagaatatttattctcatcatcctaacaagtttagtattcatgtctatggtgaccactttagcaacgtggaatagccgtataggagcttttttctcacttattttgcttttactacagttagcatcaagtgcaggtacttatccacttgctttgacaaatgatttctttagatctattaatccctggttaccaatgagctattcagtttcgggattacgacaaacaatctctatcaacaagtcattttcc

SEQ ID NO: 4684 - skipped

SEQ ID NO: 4685 - DNA, 765 bp, Streptococcus pneumoniae
atgatcgggatttctcttattccagatctgtacaatatcatatttttgtcatcaatgtgggatccatatgggcaattgtctgacttacctgtggcagttgtaaataatgataaagaggcttcctataatggtaatactatggcaataggaaaagacatggtgtccaatttaaaagaaaataaaaccttggattttcattttgtagatgaagaggaaggaaagaagggattggaagatggcgattactatatggtagtgactttaccaagtgatttatctgaaaaaacaactacattatccaatattcaatcgacagcagcttatcaatcattgacaagtgagcaacaaactgagataagtgattctgtatctcaaaattcaactgatagtattcaatcggctcagtcaattgtagctttagtacaagatttacagggaagtttagaaaacttacaaaatcaatcttctaatctttcgactttaaaaaatcaatctaatcaagtatcacctattacttctacttctttgataggattgtcaagtggattaacagagatacaaggagatgttactagcaaattagttcctgccagtcagtcgattgcatcaggtgtaaacgcatatactacaggtgttgataaagtttctcagggcgcaagtcaactaagtgaaaaaaatgccaccttgacaggtagtttggataaactagtttcaggctcaaacaccttgacacaaaaatcttctagattgacagcaggagttggt

SEQ ID NO: 4686 - protein, 255 aa, Streptococcus pneumoniae
  hypothetical protein; Cellular location: cytoplasm; Feature of note: similar to toxin Deinococcus; Similar to strain R6 sequence 15904080 (e-139)
MIGISLIPDLYNIIFLSSMWDPYGQLSDLPVAVVNNDKEASYNGNTMAIGKDMVSNLKENKTLDFHFVDEEEGKKGLEDGDYYMVVTLPSDLSEKTTTLSNIQSTAAYQSLTSEQQTEISDSVSQNSTDSIQSAQSIVALVQDLQGSLENLQNQSSNLSTLKNQSNQVSPITSTSLIGLSSGLTEIQGDVTSKLVPASQSIASGVNAYTTGVDKVSQGASQLSEKNATLTGSLDKLVSGSNTLTQKSSRLTAGVG

SEQ ID NO: 4687 - DNA, 540 bp, Streptococcus pneumoniae
atgcaagaaagtaacaaacgcttaaaaacaaagcgaactattgaaaatgctatggtacaattactgatggaacagccatttgataaaatttctactgtcaaattagtagaaaaagccggaattagtcgttccagcttctatactcactataaggataagtatgatatgattgagcactatcaaagcaagctattccatacatttgaatatatttttcaaaaacatgctcatcacaaaagagacgctattttagaagtttttgaatatctagagtcagaaccacttctggctgcccttctttctgaaaatgggactaaagaaatccaaaatttcttacgaaataaacttcatatcatgcttagtacagatttacaaaagcgatttatgcaactgaatctaaataccactgaattagaatatagtagcatctatctaactcatgcactttttggtgtctgccaaacttggattgcacatggaaaaaaagaaagttctcaagaaataacagacttccttatgaaaatgcttggtgatacaaat

SEQ ID NO: 4688 - protein, 180 aa, Streptococcus pneumoniae
  transcriptional regulator, TetR family; Cellular location: cytoplasm; Similar to strain R6 sequence 15904081 (e-102)
MQESNKRLKTKRTIENAMVQLLMEQPFDKISTVKLVEKAGISRSSFYTHYKDKYDMIEHYQSKLFHTFEYIFQKHAHHKRDAILEVFEYLESEPLLAALLSENGTKEIQNFLRNKLHIMLSTDLQKRFMQLNLNTTELEYSSIYLTHALFGVCQTWIAHGKKESSQEITDFLMKMLGDTN

SEQ ID NO: 4689 - DNA, 750 bp, Streptococcus pneumoniae
atgaaagttttaattttagaagatgttattgaacatcaagtgagactagagagaatattggatgaaatttcgaaagaatcgaatattccaatatcatacaagacaacgggaaaagtccgtgaatttgaagaatacattgaaaatgatgaagtaaatcagctttatttcctagatatcgatattcatggaattgagaaaaagggatttgaagtggctcagctcattcgtcattacaatccttacgctattatcgtctttatcactagtcgatcagagtttgcgactctaacctataaataccaggtatcagccctagattttgttgataaggatatcaatgatgagatgtttaagaagagaattgagcaaaatatcttctacacgaagagtatgttacttgaaaatgaagatgttgtagattatttcgactacaattacaagggaaatgatttaaaaattccttaccatgatattttgtatattgaaacaacaggggtatctcataaattgcgcattattggtaagaattttgcaaaagagttttatggtaccatgacagatattcaggaaaaggacaaacatactcagcgattttattctcctcacaagtcatttttggtaaatataggtaatatcagagaaattgatcgaaaaaacttagaaattgttttctatgaagaccatcgttgtcctatttcaagattaaaaattagaaaattaaaagatattttagagaaaaaatctcaaaag

SEQ ID NO: 4690 - protein, 250 aa, Streptococcus pneumoniae
  response regulator ComE (comE); Cellular location: cytoplasm; Similar to strain R6 sequence 15904082 (e-144)
MKVLILEDVIEHQVRLERILDEISKESNIPISYKTTGKVREFEEYIENDEVNQLYFLDIDIHGIEKKGFEVAQLIRHYNPYAIIVFITSRSEFATLTYKYQVSALDFVDKDINDEMFKKRIEQNIFYTKSMLLENEDVVDYFDYNYKGNDLKIPYHDILYIETTGVSHKLRIIGKNFAKEFYGTMTDIQEKDKHTQRFYSPHKSFLVNIGNIREIDRKNLEIVFYEDHRCPISRLKIRKLKDILEKKSQK

SEQ ID NO: 4691 - DNA, 1323 bp, Streptococcus pneumoniae
atggatttacttggatttgggacagttattgttcattttttaattattagtcacagttaccgtttaatttgtaaaggtcgaataaatagaaaagaattatacgtttttggtgcttatacattactaactgaaatagtacttgaattttccttttatcttctatatttagataaaatagggattgaaagatttttatttcctttgggcttatattcctattttcgatggatgaaacagtatgagagggatagaggactattcctaagtttactactatctcttttatatgagagcactcataactttctgtccgtaattttctcctctataacaggagataattttgttttacaatatcatttcccattctttttcgttgtgacggtgttaacctattttgttacattaaaaatcatttactatttccatttggaactagcctattttgacaaggactacctttatcctttcttgaaaaaagtattttttgctttactattgctacatattgtatctttcgtttcagatatggtaagtacgattaaacatttgaatagttttggaagtattttgtcatctattgtctttatctctctccttttgaccttctttgcaatgaattctcataaagttcaaatggagaaagagattgctttgaagcagaagaaatttgaacagaaacatttacagaattacacagatgaaattgttggtctgtataatgaaatccgtggttttcgacatgattatgctggaatgcttgtcagcatgcagatggcaattgacagtggtaatttacaggaaattgacagaatttacaatgaagttttagtcaaagcaaatcataaattgcgttcagataagtacacttactttgatttgaacaacatagaagactcagctttacgaagtttggttgctcagtcaattgtctatgctcgaaataatggtgtagagtttacactggaagtaaaagatacgattaccaagcttccaattgaactattggatttggttcgtatcatgagcgttttattgaataatgctgtcgaaggatcggctgatagctataaaaagcagatggaagtagcagttattaagatggaaactgaaacagttattgtgattcagaattcatgtaaaatgacgatgactccttcaggagatctatttgccttaggattctccactaagggaagaaatcgcggagtcggattaaataatgtgaaagaactactagataagtacaacaatattattttagaaacagagatggaaggcagtacatttagacaaatcattagatttaagagggaatttgaa

SEQ ID NO: 4692 - protein, 441 aa, Streptococcus pneumoniae
  putative sensor histidine kinase ComD (comD); Cellular location: membrane; Similar to strain R6 sequence 15904083 (0.E+01)
MDLLGFGTVIVHFLIISHSYRLICKGRINRKELYVFGAYTLLTEIVLEFSFYLLYLDKIGIERFLFPLGLYSYFRWMKQYERDRGLFLSLLLSLLYESTHNFLSVIFSSITGDNFVLQYHFPFFFVVTVLTYFVTLKIIYYFHLELAYFDKDYLYPFLKKVFFALLLLHIVSFVSDMVSTIKHLNSFGSILSSIVFISLLLTFFAMNSHKVQMEKEIALKQKKFEQKHLQNYTDEIVGLYNEIRGFRHDYAGMLVSMQMAIDSGNLQEIDRIYNEVLVKANHKLRSDKYTYFDLNNIEDSALRSLVAQSIVYARNNGVEFTLEVKDTITKLPIELLDLVRIMSVLLNNAVEGSADSYKKQMEVAVIKMETETVIVIQNSCKMTMTPSGDLFALGFSTKGRNRGVGLNNVKELLDKYNNIILETEMEGSTFRQIIRFKREFE

SEQ ID NO: 4693 - DNA, 123 bp, Streptococcus pneumoniae
atgaaaaacacagttaaattggaacagtttgtagctttgaaggaaaaagacttacaaaagattaaaggtggggagatgaggatttcaagaatcatccttgattttcttttcctacgaaaaaag

SEQ ID NO: 4694 - protein, 41 aa, Streptococcus pneumoniae
  competence stimulating peptide 2 (comC2); Cellular location: cytoplasm; Similar to strain R6 sequence 15904084 (3.E-14)
MKNTVKLEQFVALKEKDLQKIKGGEMRISRIILDFLFLRKK

SEQ ID NO: 4695 - DNA, 477 bp, Streptococcus pneumoniae
atgaaaattaaagttgtaacagttgggaaactgaaagaaaagtatttaaaagatggtatcgcagagtattcaaaacgaatttctagatttgctaagtttgaaatgattgagttatcagatgaaaaaacaccagataaggccagtgaatcagaaaatcaaaagattttagaaatagaaggtcagagaattttatcaaaaattgctgaccgtgatttcgttattgtgttagccattgaagggaaaactttcttctcagaagaatttagtaagcagttagaagaaacttctataaaaggattttctactcttacttttattattgggggaagtttaggattatcatcatctgtaaaaaatagagccaatctttctgtcagttttggtcgcctaaccttaccccatcagttaatgagactagttcttgttgaacaaatctatcgcgcttttacgattcagcagggattcccctaccataaa

SEQ ID NO: 4696 - protein, 159 aa, Streptococcus pneumoniae
  conserved hypothetical protein; Cellular location: cytoplasm; Similar to strain R6 sequence 15904085 (7.E-85)
MKIKVVTVGKLKEKYLKDGIAEYSKRISRFAKFEMIELSDEKTPDKASESENQKILEIEGQRILSKIADRDFVIVLAIEGKTFFSEEFSKQLEETSIKGFSTLTFIIGGSLGLSSSVKNRANLSVSFGRLTLPHQLMRLVLVEQIYRAFTIQQGFPYHK

SEQ ID NO: 4697 - DNA, 1191 bp, Streptococcus pneumoniae
atggaggcaaatatgaaacatctaaaaacattttacaaaaaatggtttcaattattagtcgttatcgtcattagcttttttagtggagccttgggtagtttttcaataactcaactaactcaaaaaagtagtgtaaacaactctaacaacaatagtactattacacaaactgcctataagaacgaaaattcaacaacacaggctgttaacaaagtaaaagatgctgttgtttctgttattacttattcggcaaacagacaaaatagcgtatttggcaatgatgatactgacacagattctcagcgaatctctagtgaaggatctggagttatttataaaaagaatgataaagaagcttacatcgtcaccaacaatcacgttattaatggcgccagcaaagtagatattcgattgtcagatgggactaaagtacctggagaaattgtcggagctgacactttctctgatattgctgtcgtcaaaatctcttcagaaaaagtgacaacagtagctgagtttggtgattctagtaagttaactgtaggagaaactgctattgccatcggtagcccgttaggttctgaatatgcaaatactgtcactcaaggtatcgtatccagtctcaatagaaatgtatccttaaaatcggaagatggacaagctatttctacaaaagccatccaaactgatactgctattaacccaggtaactctggcggcccactgatcaatattcaagggcaggttatcggaattacctcaagtaaaattgctacaaatggaggaacatctgtagaaggtcttggtttcgcaattcctgcaaatgatgctatcaatattattgaacagttagaaaaaaacggaaaagtgacgcgtccagctttgggaatccagatggttaatttatctaatgtgagtacaagcgacatcagaagactcaatattccaagtaatgttacatctggtgtaattgttcgttcggtacaaagtaatatgcctgccaatggtcaccttgaaaaatacgatgtaattacaaaagtagatgacaaagagattgcttcatcaacagacttacaaagtgctctttacaaccattctatcggagacaccattaagataacctactatcgtaacgggaaagaagaaactacctctatcaaacttaacaagagttcaggtgatttagaatct

SEQ ID NO: 4698 - protein, 397 aa, Streptococcus pneumoniae
  serine protease; Cellular location: outside; Similar to strain R6 sequence 15904086 (0.E+01)
MEANMKHLKTFYKKWFQLLVVIVISFFSGALGSFSITQLTQKSSVNNSNNNSTITQTAYKNENSTTQAVNKVKDAVVSVITYSANRQNSVFGNDDTDTDSQRISSEGSGVIYKKNDKEAYIVTNNHVINGASKVDIRLSDGTKVPGEIVGADTFSDIAVVKISSEKVTTVAEFGDSSKLTVGETAIAIGSPLGSEYANTVTQGIVSSLNRNVSLKSEDGQAISTKAIQTDTAINPGNSGGPLINIQGQVIGITSSKIATNGGTSVEGLGFAIPANDAINIIEQLEKNGKVTRPALGIQMVNLSNVSTSDIRRLNIPSNVTSGVIVRSVQSNMPANGHLEKYDVITKVDDKEIASSTDLQSALYNHSIGDTIKITYYRNGKEETTSIKLNKSSGDLES

SEQ ID NO: 4699 - DNA, 756 bp, Streptococcus pneumoniae
atggaaaaatttgaaatgatttctatcacagatatacaaaaaaatccctatcaaccccgaaaagaatttgatagagaaaaactagatgaactagcacagtctatcaaagaaaatggggtcattcaaccgattattgttcgtcaatctcctgttattggttatgaaatccttgcaggagagagacgctatcgggcttcacttttagctggtctacggtctatcccagctgttgttaaacagatttcagaccaagagatgatggtccagtccattattgaaaatttacagagagaaaatttaaacccaatagaagaagcacgcgcctatgaatctctcgtagagaaaggattcacccatgctgaaattgcagataagatgggcaagtctcgtccatatatcagcaactccattcgtttactttccttgccagaacagattctttcagaagtagaaaatggcaaactatcacaagcccatgcgcgttccctagttgggttaaataaggaacaacaagactatttctttcaacggattatagaagaagatatttctgtaaggaaattagaagctcttctgacagagaaaaaacaaaagaaacagcaaaaaactaatcatttcatacaaaatgaagaaaaacagttaagaaaactactcggattagatgtagaaattaaactatctaaaaaagacagtggaaaaatcattatttctttttcaaatcaagaagaatatagtagaattatcaacagcctgaaa

SEQ ID NO: 4700 - protein, 252 aa, Streptococcus pneumoniae
  spspoJ protein; Cellular location: cytoplasm; Similar to strain R6 sequence 15904087 (e-138)
MEKFEMISITDIQKNPYQPRKEFDREKLDELAQSIKENGVIQPIIVRQSPVIGYEILAGERRYRASLLAGLRSIPAVVKQISDQEMMVQSIIENLQRENLNPIEEARAYESLVEKGFTHAEIADKMGKSRPYISNSIRLLSLPEQILSEVENGKLSQAHARSLVGLNKEQQDYFFQRIIEEDISVRKLEALLTEKKQKKQQKTNHFIQNEEKQLRKLLGLDVEIKLSKKDSGKIIISFSNQEEYSRIINSLK

SEQ ID NO: 4701 - DNA, 1359 bp, Streptococcus pneumoniae
ttgaaagaaaaacaattttggaatcgtatattagaatttgcacaagaaagactgactcgatccatgtatgatttctatgctattcaagctgaactcatcaaggtagaggaaaatgttgccactatatttctacctcgctctgaaatggaaatggtctgggaaaaacaactaaaagatattattgtagtagctggttttgaaatttatgacgctgaaataactccccactatattttcaccaaacctcaagatacgactagctcacaagttgaagaagctacaaatttaactctttataactatagtccaaagttagtatctattccttattcagatacgggattaaaagaaaagtatacctttgataactttattcaaggggatggaaatgtttgggctgtatcagccgctttagctgtctctgaagatttggctctgacctataaccctctttttatctatggaggaccaggccttggtaagactcacttattaaacgctattggaaatgaaattctaaaaaatattcctaatgcgcgtgttaaatatatccctgccgaaagctttattaatgactttcttgatcacctaagacttggggaaatggaaaagtttaaaaagacctatcgtagtcttgatcttttgttaatcgatgatatccagtcactcagcggaaaaaaagtcgcaactcaggaagaatttttcaatacctttaacgcccttcatgacaagcaaaaacagattgtcctaacgagtgatcgtagtccaaaacatctagaagggctcgaggagaggcttgtcacgcgttttagttggggattgacacaaactatcaccccccctgactttgaaacacgtattgccattttacaaagtaagacggaacatttaggctacaatttccaaagtgatactctagaatacctagctgggcaatttgattcaaatgttcgagatcttgagggagccatcaacgacatcactttaattgccagagtaaaaaaaatcaaggatatcactattgatattgctgcagaagccattagagcccgcaaacaagatgttagccaaatgctcgtcatcccaattgataaaatccaaactgaagttggtaacttttatggtgttagtatcaaagaaatgaagggaagtagacgccttcaaaatattgttttggcccgtcaagtagccatgtatttatctagagaactaacagataatagtcttccaaaaattgggaaggaatttgggggaaaagatcataccacagtcattcatgcccatgccaaaataaaatctttgattgatcaagacgataatttacgtttagaaattgaatcaatcaaaaagaaaatcaaa

SEQ ID NO: 4702 - protein, 453 aa, Streptococcus pneumoniae
  chromosomal replication initiator protein DnaA (dnaA); Cellular location: cytoplasm; Similar to strain R6 sequence 15902045 (0.E+01)
MKEKQFWNRILEFAQERLTRSMYDFYAIQAELIKVEENVATIFLPRSEMEMVWEKQLKDIIVVAGFEIYDAEITPHYIFTKPQDTTSSQVEEATNLTLYNYSPKLVSIPYSDTGLKEKYTFDNFIQGDGNVWAVSAALAVSEDLALTYNPLFIYGGPGLGKTHLLNAIGNEILKNIPNARVKYIPAESFINDFLDHLRLGEMEKFKKTYRSLDLLLIDDIQSLSGKKVATQEEFFNTFNALHDKQKQIVLTSDRSPKHLEGLEERLVTRFSWGLTQTITPPDFETRIAILQSKTEHLGYNFQSDTLEYLAGQFDSNVRDLEGAINDITLIARVKKIKDITIDIAAEAIRARKQDVSQMLVIPIDKIQTEVGNFYGVSIKEMKGSRRLQNIVLARQVAMYLSRELTDNSLPKIGKEFGGKDHTTVIHAHAKIKSLIDQDDNLRLEIESIKKKIK

SEQ ID NO: 4703 - DNA, 1134 bp, Streptococcus pneumoniae
atgattcatttttcaattaataaaaatttatttctacaagcattaaatactactaagagagctattagttctaaaaatgccattcctattttatcaacagtaaaaattgacgtgaccaatgaaggtattactttaattggttcaaatggtcaaatttcaattgaaaattttatttctcaaaaaaatgaagatgctggtttgttaattacttctttaggttcgatccttcttgaagcttctttctttatcaatgtagtatctagtttacctgatgtaactcttgattttaaagaaattgaacaaaatcaaattgttttaaccagtggcaaatcagaaattaccctaaaaggaaaagatagcgaacaatatccacgaatccaagaaatttcagcaagcactcctttaatacttgaaacaaaattactcaagaaaattattaatgaaacagcctttgctgcaagtacacaagagagtcgtccgattttaacaggtgtccacttcgtattgagtcaacacaaagagttaaaaacagttgcaacagactctcatcgcctaagccagaaaaaattgactcttgaaaaaaatagtgatgattttgatgtcgtaattcctagccgttctctacgcgaattttcagcggtatttacagatgatatcgaaactgtagagattttctttgccaataaccaaatcctctttagaagcgaaaatattagcttctatactcgtctcctagaaggaaactatcctgatacagatcgcttgattccaacagactttaacactactattacttttaatgtggtaaacttacgccagtcaatggagcgtgcccgtcttttatcaagtgcgactcaaaatggtactgtgaaacttgaaattaaggatggggttgttagcgcccatgttcactctccagaagttggtaaagtaaacgaagaaatcgatactgatcaggttactggtgaagatttgaccattagtttcaacccaacttacttgattgattctcttaaagctttaaatagcgaaaaggtgactattagctttatctcagctgttcgtccatttactcttgtgccagcagatactgacgaagacttcatgcagctcattacaccagttcgtacaaat

SEQ ID NO: 4704 - protein, 378 aa, Streptococcus pneumoniae
  DNA polymerase III, beta subunit (dnaN); Cellular location: membrane; Similar to strain R6 sequence 15902046 (0.E+01)
MIHFSINKNLFLQALNTTKRAISSKNAIPILSTVKIDVTNEGITLIGSNGQISIENFISQKNEDAGLLITSLGSILLEASFFINVVSSLPDVTLDFKEIEQNQIVLTSGKSEITLKGKDSEQYPRIQEISASTPLILETKLLKKIINETAFAASTQESRPILTGVHFVLSQHKELKTVATDSHRLSQKKLTLEKNSDDFDVVIPSRSLREFSAVFTDDIETVEIFFANNQILFRSENISFYTRLLEGNYPDTDRLIPTDFNTTITFNVVNLRQSMERARLLSSATQNGTVKLEIKDGVVSAHVHSPEVGKVNEEIDTDQVTGEDLTISFNPTYLIDSLKALNSEKVTISFISAVRPFTLVPADTDEDFMQLITPVRTN

SEQ ID NO: 4705 - DNA, 246 bp, Streptococcus pneumoniae
ttgagcctggctcgcctcttttatgatataatcgaaaaagaaaaggagagtagtatgtatcaagttggaaattttgttgagatgaaaaaatcacacgcttgtacaatcaagtcgactggtaaaaaggctaatcgttgggaaattacacgtgtaggagcagatatcaaaataaaatgtagtaattgtgagcatgttgtcatgatggggcgatatgattttgagcgaaaaatgaataaaattattgac

SEQ ID NO: 4706 - protein, 82 aa, Streptococcus pneumoniae
  hypothetical protein; Cellular location: cytoplasm; Similar to strain R6 sequence 15902047 (5.E-34)
MSLARLFYDIIEKEKESSMYQVGNFVEMKKSHACTIKSTGKKANRWEITRVGADIKIKCSNCEHVVMMGRYDFERKMNKIID

SEQ ID NO: 4707 - DNA, 1122 bp, Streptococcus pneumoniae
atgagaaatatggctttgacagcaggtatcgttggtttgccaaacgttggtaaatcaacactatttaatgcaattacaaaagcaggagcagaggcagcaaactacccatttgcgacgattgatccaaatgttggaatggtggaagttccagatgaacgcctacaaaaactaactgaaatgataactcctaaaaagacagttcccacaacatttgaatttacagatattgcagggattgtaaaaggagcttcaaaaggagaggggctagggaataaattcttggccaatattcgtgaagtagatgcgattgttcacgtagttcgtgcttttgatgatgaaaatgtaatgcgcgagcaaggacgtgaagacgcctttgtagatccacttgcagatattgataccattaatctggaattgattcttgctgacttagaatcagtgaacaaacgatatgcgcgtgtagaaaagatggcacgtacgcaaaaagataaagaatcagtagcagaattcaatgttcttcaaaagattaaaccagtcctagaagacgggaaatcagctcgtaccattgaatttacagatgaggaacaaaaggttgtcaaaggtcttttccttttgacgactaaaccagttctttatgtagctaatgtggacgaggatgtggtttcagaacctgactctatcgactatgtcaaacaaattcgtgaatttgcagcgacagaaaatgctgaagtagtcgttatttctgcgcgtgctgaggaagaaatttctgaattgaatgatgaagataaaaaagagtttcttgaagccattggtttgacagaatcaggtgtagataagttgacgcgtgcagcttaccacttgcttggattgggaacttacttcacagctggtgaaaaagaagttcgcgcttggactttcaaacgtggtatgaaggctcctcaagcagctggtattatccactcagactttgaaaaaggctttattcgtgcagtaaccatgtcatatgaagatctagtgaaatacggatctgaaaaggccgtaaaagaagctggacgcttgcgtgaagaaggaaaagaatatatcgttcaagatggcgatatcatggaattccgctttaatgtc

SEQ ID NO: 4708 - protein, 374 aa, Streptococcus pneumoniae
  GTP-binding protein; Cellular location: outside; Similar to strain R6 sequence 15902048 (0.E+01)
MRNMALTAGIVGLPNVGKSTLFNAITKAGAEAANYPFATIDPNVGMVEVPDERLQKLTEMITPKKTVPTTFEFTDIAGIVKGASKGEGLGNKFLANIREVDAIVHVVRAFDDENVMREQGREDAFVDPLADIDTINLELILADLESVNKRYARVEKMARTQKDKESVAEFNVLQKIKPVLEDGKSARTIEFTDEEQKVVKGLFLLTTKPVLYVANVDEDVVSEPDSIDYVKQIREFAATENAEVVVISARAEEEISELNDEDKKEFLEAIGLTESGVDKLTRAAYHLLGLGTYFTAGEKEVRAWTFKRGMKAPQAAGIIHSDFEKGFIRAVTMSYEDLVKYGSEKAVKEAGRLREEGKEYIVQDGDIMEFRFNV

SEQ ID NO: 4709 - DNA, 567 bp, Streptococcus pneumoniae
atgaccaaattacttgtaggcttgggaaatccaggggataaatattttgaaacaaaacacaatgttggttttatgttgattgatcaactagcgaagaaacagaatgtcacttttacacacgataagatatttcaagctgacctagcatcctttttcctaaatggagaaaaaatttatctggttaaaccaacgacctttatgaatgaaagtggaaaagcagttcatgctttattaacttactatggtttggatattgacgatttacttatcatttacgatgatcttgacatggaagttgggaaaattcgtttaagagcaaaaggctcagcaggtggtcataatggtatcaagtctattattcaacatataggaactcaggtctttaaccgtgttaagattggaattggaagacctaaaaatggtatgtcagttgttcatcatgttttgagtaagtttgacagggatgattatatcggtattttacagtctgttgacaaagttgacgattctgtaaactactatttacaagagaaaaattttgagaaaacaatgcagaggtataacgga

SEQ ID NO: 4710 - protein, 189 aa, Streptococcus pneumoniae
  peptidyl-tRNA hydrolase (pth); Cellular location: cytoplasm; Similar to strain R6 sequence 15902049 (e-107)
MTKLLVGLGNPGDKYFETKHNVGFMLIDQLAKKQNVTFTHDKIFQADLASFFLNGEKIYLVKPTTFMNESGKAVHALLTYYGLDIDDLLIIYDDLDMEVGKIRLRAKGSAGGHNGIKSIIQHIGTQVFNRVKIGIGRPKNGMSVVHHVLSKFDRDDYIGILQSVDKVDDSVNYYLQEKNFEKTMQRYNG

SEQ ID NO: 4711 - DNA, 3507 bp, Streptococcus pneumoniae
atggtgaccttattagatttattctcagaaaatgatcagattaaaaaatggcatcaaaatttaacagataagaaaagacaactaatacttggtttatcaacatctactaaggctcttgcaattgcaagcagtttagaaaaagaagataggattgtgttattgacgtcaacttatggagaagcagaaggacttgttagtgatcttatttctatcttgggtgaggaactcgtctatccatttttggtagatgatgctcctatggtggagtttttgatgtcttcacaggaaaaaattatttcacgggttgaagccttgcgttttttgactgattcatctaagaaagggattttagtttgtaatatcgcagcaagtcgattgattttaccgtctcccaatgcattcaaagatagtattgtaaaaatctcagttggtgaagaatatgatcaacacgcgtttatccatcagttaaaggaaaatggctatcgaaaagttactcaagtacaaactcagggcgaatttagtcttcgaggagatattttagatatttttgaaatatcccagttagaaccttgtcgaattgagttttttggtgatgaaattgatggtatcaggtcatttgaagtagaaacacaattatcgaaagaaaataagacagaactcactatctttccagctagtgatatgcttttgagagaaaaggattatcaacgaggacagtcagctttagaaaaacaaatttcaaaaactttatcacctattttgaaatcatacctagaagaaattctttcaagttttcaccaaaaacaaagtcatgcagactctcggaagtttttatctttgtgctatgataagacatggactgtctttgattatattgaaaaagatactccaatattctttgatgattatcaaaaattgatgaatcagtatgaagtctttgaaagagacttagcgcagtactttacagaagaattacagaatagtaaagcattttctgatatgcagtatttttctgatattgaacaaatctataaaaaacaaagtccagtgacctttttctctaatcttcaaaagggtttaggaaatctcaaatttgacaaaatttatcaattcaatcaatatcctatgcaggaatttttcaatcagttttcttttctaaaagaagaaattgaacgatataaaaaaatggattacaccattattctgcagtctagcaattcaatgggaagtaaaacattggaggatatgttagaggaatatcagattaaattggattctagagataagacaaatatctgtaaagaatctgtaaacttaatagagggtaatctcagacatggttttcattttgtagatgaaaagattttattgataactgaacatgagatttttcaaaagaaattaaagcgtcgttttcgaagacaacatgtttcaaatgcagagagattaaaagattacaatgaacttgaaaaaggggactatgttgtccatcatatccatgggattggtcaatatctaggaattgaaaccattgaaatcaagggaattcatcgcgattatgtcagtgtccaataccaaaatggtgatcaaatttctatccccgtggaacagattcatctactgtccaaatatatttcaagtgatggtaaagctccaaaactcaataaattaaatgacggtcattttaaaaaggccaagcaaaaggttaagaaccaggtagaggatatagctgatgatttaatcaaactctactctgaacgtagtcagttgaagggttttgctttctcagctgatgatgatgatcaagatgcctttgatgatgctttcccttatgttgaaacggatgatcaacttcgtagtattgaggaaatcaagagggatatgcaggcttctcagccaatggatcgacttttagttggggatgttggttttggaaagactgaagttgctatgcgtgcagcctttaaagcagtcaatgatcacaaacaggttgtcattctagttccgacgacggttttagcgcaacagcactatacgaattttaaggaacgattccaaaattttgcagttaatattgatgtgttgagtcgctttagaagtaaaaaagagcagactgcaacacttgaaaaattgaaaaacggtcaagtcgatattttgattggaacacatcgtgttttgtcaaaagatgttgtgtttgctgatttgggcttgatgattattgatgaggaacagcgatttggtgtcaagcataaggaaactttgaaagaactgaagaaacaagtggatgtcctaaccttgaccgctacgccaatccctcgtaccctccatatgtctatgctgggaatcagagatttatctgttattgaaactccgccgactaatcgctatcctgttcagacctatgttttggaaaagaatgatagtgtcattcgtgatgctgtcttgcgtgaaatggagcgtggaggtcaagtttattatctttacaacaaagttgacacaattgttcagaaggtttcagaattacaggagttgattccggaggcttcgattggatatgttcatggtcgaatgagtgaagtccagttggaaaatactctattagactttattgagggacaatacgatatcttggtgacgactactattattgagacaggggtggacattccaaatgctaatactttatttattgaaaatgcggaccatatgggcttgtcaaccttatatcagttaagaggaagagtcggtcgtagtaatcgtattgcttatgcttatctcatgtatcgtccagaaaaatcaatcagtgaagtctctgaaaagagattagaagcgattaaaggatttacagaattgggctctggctttaagattgcaatgcgagatctttcgattcgtggagcaggaaatcttttaggaaaatcccagtctggtttcattgattctgttggttttgaattgtattcgcagttattagaggaagctattgctaaacgaaacggtaatgctaacgctaacacaagaaccaaagggaatgctgagttgattttgcaaattgatgcctatcttcctgatacttatatttctgatcaacgacataagattgaaatttacaagaaaattcgtcaaattgacaaccgtgtcaattatgaagagttacaagaggagttgatagaccgttttggagaatacccagatgtagtagcctatctgttagagattggtttggtcaaatcatacttggacaaggtctttgttcaacgtgtggaaagaaaagataataaaattacaattcaatttgaaaaagtcactcaacgactgtttttagctcaagattattttaaagctttatccgtaacgaacttaaaagcaggcatcgctgagaataagggattaatggagcttgtatttgatgtccaaaataagaaagattatgaaattttagaaggtttgctgatttttggagaaagtttattagagataaaagagtctaaggaagaaaattccatt

SEQ ID NO: 4712 - protein, 1169 aa, Streptococcus pneumoniae
  transcription-repair coupling factor (mfd); Cellular location: cytoplasm; Similar to strain R6 sequence 15902050 (0.E+01)
MVTLLDLFSENDQIKKWHQNLTDKKRQLILGLSTSTKALAIASSLEKEDRIVLLTSTYGEAEGLVSDLISILGEELVYPFLVDDAPMVEFLMSSQEKIISRVEALRFLTDSSKKGILVCNIAASRLILPSPNAFKDSIVKISVGEEYDQHAFIHQLKENGYRKVTQVQTQGEFSLRGDILDIFEISQLEPCRIEFFGDEIDGIRSFEVETQLSKENKTELTIFPASDMLLREKDYQRGQSALEKQISKTLSPILKSYLEEILSSFHQKQSHADSRKFLSLCYDKTWTVFDYIEKDTPIFFDDYQKLMNQYEVFERDLAQYFTEELQNSKAFSDMQYFSDIEQIYKKQSPVTFFSNLQKGLGNLKFDKIYQFNQYPMQEFFNQFSFLKEEIERYKKMDYTIILQSSNSMGSKTLEDMLEEYQIKLDSRDKTNICKESVNLIEGNLRHGFHFVDEKILLITEHEIFQKKLKRRFRRQHVSNAERLKDYNELEKGDYVVHHIHGIGQYLGIETIEIKGIHRDYVSVQYQNGDQISIPVEQIHLLSKYISSDGKAPKLNKLNDGHFKKAKQKVKNQVEDIADDLIKLYSERSQLKGFAFSADDDDQDAFDDAFPYVETDDQLRSIEEIKRDMQASQPMDRLLVGDVGFGKTEVAMRAAFKAVNDHKQVVILVPTTVLAQQHYTNFKERFQNFAVNIDVLSRFRSKKEQTATLEKLKNGQVDILIGTHRVLSKDVVFADLGLMIIDEEQRFGVKHKETLKELKKQVDVLTLTATPIPRTLHMSMLGIRDLSVIETPPTNRYPVQTYVLEKNDSVIRDAVLREMERGGQVYYLYNKVDTIVQKVSELQELIPEASIGYVHGRMSEVQLENTLLDFIEGQYDILVTTTIIETGVDIPNANTLFIENADHMGLSTLYQLRGRVGRSNRIAYAYLMYRPEKSISEVSEKRLEAIKGFTELGSGFKIAMRDLSIRGAGNLLGKSQSGFIDSVGFELYSQLLEEAIAKRNGNANANTRTKGNAELILQIDAYLPDTYISDQRHKIEIYKKIRQIDNRVNYEELQEELIDRFGEYPDVVAYLLEIGLVKSYLDKVFVQRVERKDNKITIQFEKVTQRLFLAQDYFKALSVTNLKAGIAENKGLMELVFDVQNKKDYEILEGLLIFGESLLEIKESKEENSI

SEQ ID NO: 4713 - DNA, 264 bp, Streptococcus pneumoniae
atgagattagataaatatttaaaagtatcgcgaattatcaagcgtcgtacagtcgcaaaggaagtagcagataaaggtagaatcaaggttaatggaatcttggccaaaagttcaacggacttgaaagttaatgaccaagttgaaattcgctttggcaataagttgctgcttgtaaaagtactagagatgaaagatagtacaaaaaaagaagatgcagcaggaatgtatgaaattatcagtgaaacacgggtagaagaaaatgtc

SEQ ID NO: 4714 - protein, 88 aa, Streptococcus pneumoniae
  S4 domain protein; Cellular location: cytoplasm; Similar to strain R6 sequence 15902051 (7.E-44)
MRLDKYLKVSRIIKRRTVAKEVADKGRIKVNGILAKSSTDLKVNDQVEIRFGNKLLLVKVLEMKDSTKKEDAAGMYEIISETRVEENV

SEQ ID NO: 4715 - DNA, 366 bp, Streptococcus pneumoniae
atgtctaaaaatattgtacaattgaataattcttttattcaaaatgaataccaacgtcgtcgctacctgatgaaagaacgacaaaaacggaatcgttttatgggaggggtattgattttgattatgctattatttatcttgccaacttttaatttagcgcagagttatcagcaattactccaaagacgtcagcaattagcagacttgcaaactcagtatcaaactttgagtgatgaaaaggataaggagacagcatttgctaccaagttgaaagatgaagattatgctgctaaatatacacgagcgaagtactattattctaagtcgagggaaaaagtttatacgattcctgacttgcttcaaagg

SEQ ID NO: 4716 - protein, 122 aa, Streptococcus pneumoniae
  hypothetical protein; Cellular location: membrane; Similar to strain R6 sequence 15902052 (8.E-66)
MSKNIVQLNNSFIQNEYQRRRYLMKERQKRNRFMGGVLILIMLLFILPTFNLAQSYQQLLQRRQQLADLQTQYQTLSDEKDKETAFATKLKDEDYAAKYTRAKYYYSKSREKVYTIPDLLQR

SEQ ID NO: 4717 - DNA, 120 bp, Streptococcus pneumoniae
atggaaaatttattagacgtaatagagcaatttttgagtttgtcagatgaaaagctggaagaattggctgataaaaatcaattattgcgtttacaagaagaaaaggaaaggaagaatgcg

SEQ ID NO: 4718 - protein, 40 aa, Streptococcus pneumoniae
  hypothetical protein; Cellular location: cytoplasm
MENLLDVIEQFLSLSDEKLEELADKNQLLRLQEEKERKNA

SEQ ID NO: 4719 - DNA, 1266 bp, Streptococcus pneumoniae
atgcgtaaattcttaattattttgttgctaccaagttttttgaccatttcaaaagtcgttagcacagaaaaagaagtcgtctatacttcgaaagaaatttattacctttcacaatctgactttggtatttattttagagaaaaattaagttctcccatggtttatggagaggttcctgtttatgcgaatgaagatttagtagtggaatctgggaaattgactcccaaaacaagttttcaaataaccgagtggcgcttaaataaacaaggaattccagtatttaagctatcaaatcatcaatttatagctgcggacaaacgatttttatatgatcaatcagaggtaactccaacaataaaaaaagtatggttagaatctgactttaaactgtacaatagtccttatgatttaaaagaagtgaaatcatccttatcagcttattcgcaagtatcaatcgacaagaccatgtttgtagaaggaagagaatttctacatattgatcaggctggatgggtagctaaagaatcaacttctgaagaagataatcggatgagtaaagttcaagaaatgttatctgaaaaatatcagaaagattctttctctatttatgttaagcaactgactactggaaaagaagctggtatcaatcaagatgaaaagatgtatgcagccagcgttttgaaactctcttatctctattatacgcaagaaaaaataaatgagggtctttatcagttagatacgactgtaaaatacgtatctgcagtcaatgattttccaggttcttataaaccagagggaagtggtagtcttcctaaaaaagaagataataaagaatattctttaaaggatttaattacgaaagtatcaaaagaatctgataatgtagctcataatctattgggatattacatttcaaaccaatctgatgccacattcaaatccaagatgtctgccattatgggagatgattgggatccaaaagaaaaattgatttcttctaagatggccgggaagtttatggaagctatttataatcaaaatggatttgtgctagagtctttgactaaaacagattttgatagtcagcgaattgccaaaggtgtttctgttaaagtagctcataaaattggagatgcggatgaatttaagcatgatacgggtgttgtctatgcagattctccatttattctttctattttcactaagaattctgattatgatacgatttctaagatagccaaggatgtttatgaggttctaaaa

SEQ ID NO: 4720 - protein, 422 aa, Streptococcus pneumoniae
  conserved domain protein; Cellular location: outside; Similar to strain R6 sequence 15902053 (0.E+01)
MRKFLIILLLPSFLTISKVVSTEKEVVYTSKEIYYLSQSDFGIYFREKLSSPMVYGEVPVYANEDLVVESGKLTPKTSFQITEWRLNKQGIPVFKLSNHQFIAADKRFLYDQSEVTPTIKKVWLESDFKLYNSPYDLKEVKSSLSAYSQVSIDKTMFVEGREFLHIDQAGWVAKESTSEEDNRMSKVQEMLSEKYQKDSFSIYVKQLTTGKEAGINQDEKMYAASVLKLSYLYYTQEKINEGLYQLDTTVKYVSAVNDFPGSYKPEGSGSLPKKEDNKEYSLKDLITKVSKESDNVAHNLLGYYISNQSDATFKSKMSAIMGDDWDPKEKLISSKMAGKFMEAIYNQNGFVLESLTKTDFDSQRIAKGVSVKVAHKIGDADEFKHDTGVVYADSPFILSIFTKNSDYDTISKIAKDVYEVLK

SEQ ID NO: 4721 - DNA, 1275 bp, Streptococcus pneumoniae
atgagggaaccagattttttaaatcattttctcaagaagggatatttcaaaaagcatgctaaggcggttctagctctttctggtggattagattccatgtttctatttaaggtattgtctacttatcaaaaagagttagagattgaattgattctagctcatgtgaatcataagcagagaattgaatcagattgggaagaaaaggaattaaggaagttggctgctgaagcagagcttcctatttatatcagcaatttttcaggagaattttcagaagcgcgtgcacgaaattttcgttatgatttttttcaagaggtcatgaaaaagacaggtgcgacagctttagtcactgcccaccatgctgatgatcaggtggaaacgatttttatgcgcttgattcgaggaactcgcttgcgctatctatcaggaattaaggagaagcaagtagtcggagagatagaaatcattcgtcccttcttgcattttcagaaaaaagactttccatcaatttttcactttgaagatacatcaaatcaggagaatcattattttcgaaatcgtattcgaaattcttacttaccagaattggaaaaagaaaatcctcgatttagggatgcaatcttaggcattggcaatgaaattttagattatgatttggcaatagctgaattatctaacaatattaatgtggaagatttacagcagttattttcttactctgagtctacacaaagagttttacttcaaacttatctgaatcgttttccagatttgaatcttacaaaagctcagtttgctgaagttcagcagattttaaaatctaaaagccagtatcgtcatccgattaaaaatggctatgaattgataaaagagtaccaacagtttcagatttgtaaaatcagtccgcaggctgatgaaaaggaagatgaacttgtgttacactatcaaaatcaggtagcttatcaaggatatttattttcttttggacttccattagaaggtgaattaattcaacaaatacctgtttcacgtgaaacatccatacacattcgtcatcgaaaaacaggagatgttttgattaaaaatgggcatagaaaaaaactcagacgtttatttattgatttgaaaatccctatggaaaagagaaactctgctcttattattgagcaatttggtgaaattgtctcaattttgggaattgcgaccaataatttgagtaaaaaaacgaaaaatgatataatgaacactgtactttatatagaaaaaatagatagg

SEQ ID NO: 4722 - protein, 425 aa, Streptococcus pneumoniae
  MesJ/Ycf62 family protein; Cellular location: membrane; Similar to strain R6 sequence 15902054 (0.E+01)
MREPDFLNHFLKKGYFKKHAKAVLALSGGLDSMFLFKVLSTYQKELEIELILAHVNHKQRIESDWEEKELRKLAAEAELPIYISNFSGEFSEARARNFRYDFFQEVMKKTGATALVTAHHADDQVETIFMRLIRGTRLRYLSGIKEKQVVGEIEIIRPFLHFQKKDFPSIFHFEDTSNQENHYFRNRIRNSYLPELEKENPRFRDAILGIGNEILDYDLAIAELSNNINVEDLQQLFSYSESTQRVLLQTYLNRFPDLNLTKAQFAEVQQILKSKSQYRHPIKNGYELIKEYQQFQICKISPQADEKEDELVLHYQNQVAYQGYLFSFGLPLEGELIQQIPVSRETSIHIRHRKTGDVLIKNGHRKKLRRLFIDLKIPMEKRNSALIIEQFGEIVSILGIATNNLSKKTKNDIMNTVLYIEKIDR

SEQ ID NO: 4723 - DNA, 540 bp, Streptococcus pneumoniae
atgttagaaaacgatattaaaaaagtcctcgtttcacacgatgaaattacagaagcagctaaaaaactaggtgctcaattaactaaagactatgcaggaaaaaatccaatcttagttgggattttaaaaggatctattccttttatggctgaattggtcaaacatattgatacacatattgaaatggacttcatgatggtttctagctaccatggtggaacagcaagtagtggtgttatcaatattaaacaagatgtgactcaagatatcaaaggaagacatgttctatttgtagaagatatcattgatacaggtcaaactttgaagaatttgcgagatatgtttaaagaaagagaagcagcttctgttaaaattgcaaccttgttggataaaccagaaggacgtgttgtagaaattgaggcagactatacttgctttactatcccaaatgagtttgtagtaggttatggtttagactacaaagaaaattatcgtaatcttccttatattggagtattgaaagaggaagtgtattcaaat

SEQ ID NO: 4724 - protein, 180 aa, Streptococcus pneumoniae
  hypoxanthine-guanine phosphoribosyltransferase (hpt); Cellular location: membrane; Similar to strain R6 sequence 15902055 (e-101)
MLENDIKKVLVSHDEITEAAKKLGAQLTKDYAGKNPILVGILKGSIPFMAELVKHIDTHIEMDFMMVSSYHGGTASSGVINIKQDVTQDIKGRHVLFVEDIIDTGQTLKNLRDMFKEREAASVKIATLLDKPEGRVVEIEADYTCFTIPNEFVVGYGLDYKENYRNLPYIGVLKEEVYSN

SEQ ID NO: 4725 - DNA, 1956 bp, Streptococcus pneumoniae
atgaaaaaacaaaataatggtttaattaaaaatccttttctatggttattatttatctttttccttgtgacaggattccagtatttctattctgggaataactcaggaggaagtcagcaaatcaactatactgagttggtacaagaaattaccgatggtaatgtaaaagaattaacttaccaaccaaatggtagtgttatcgaagtttctggtgtctataaaaatcctaaaacaagtaaagaagaaacaggtattcagtttttcacgccatctgttactaaggtagagaaatttaccagcactattcttcctgcagatactaccgtatcagaattgcaaaaacttgctactgaccataaagcagaagtaactgttaagcatgaaagttcaagtggtatatggattaatctactcgtatccattgtgccatttggaattctattcttcttcctattctctatgatgggaaatatgggaggaggcaatggccgtaatccaatgagttttggacgtagtaaggctaaagcagcaaataaagaagatattaaagtaagattttcagatgttgctggagctgaggaagaaaaacaagaactagttgaagttgttgagttcttaaaagatccaaaacgattcacaaaacttggagcccgtattccagcaggtgttcttttggagggacctccggggacaggtaaaactttgcttgctaaggcagtcgctggagaagcaggtgttccattctttagtatctcaggttctgactttgtagaaatgtttgtcggagttggagctagtcgtgttcgctctctttttgaggatgccaaaaaagcagcaccagctatcatctttatcgatgaaattgatgctgttggacgtcaacgtggagtcggtctcggcggaggtaatgacgaacgtgaacaaaccttgaaccaacttttgattgagatggatggttttgagggaaatgaagggattatcgtcatcgctgcgacaaaccgttcagatgtacttgaccctgcccttttgcgtccaggacgttttgatagaaaagtattggttggtcgtcctgatgttaaaggtcgtgaagcaatcttgaaagttcacgctaagaataagcctttagcagaagatgttgatttgaaattagtggctcaacaaactccaggctttgttggtgctgatttagagaatgtcttgaatgaagcagctttagttgctgctcgtcgcaataaatcgataattgatgcttcagatattgatgaagcagaagatagagttattgctggaccttctaagaaagataagacagtttcacaaaaagaacgagaattggttgcttaccatgaggcaggacataccattgttggtctagtcttgtcgaatgctcgcgttgtccataaggttacaattgtaccacgcggccgtgcaggcggatacatgattgcacttcctaaagaggatcaaatgcttctatctaaagaagatatgaaagagcaattggctggcttaatgggtggacgtgtagctgaagaaattatctttaatgtccaaaccacaggagcttcaaacgactttgaacaagcgacacaaatggcacgtgcaatggttacagagtacggtatgagtgaaaaacttggcccagtacaatatgaaggaaaccatgctatgcttggtgcacagagtcctcaaaaatcaatttcagaacaaacagcttatgaaattgatgaagaggttcgttcattattaaatgaggcacgaaataaagctgctgaaattattcagtcaaatcgtgaaactcacaagttaattgcagaagcattattgaaatacgaaacattggatagtacacaaattaaagctctttacgaaacaggaaagatgcctgaagcagtagaagaggaatctcatgcactatcctatgatgaagtaaagtcaaaaatgaatgacgaaaaa

SEQ ID NO: 4726 - protein, 652 aa, Streptococcus pneumoniae
  cell division protein FtsH (ftsH); Cellular location: membrane; Similar to strain R6 sequence 15902056 (0.E+01)
MKKQNNGLIKNPFLWLLFIFFLVTGFQYFYSGNNSGGSQQINYTELVQEITDGNVKELTYQPNGSVIEVSGVYKNPKTSKEETGIQFFTPSVTKVEKFTSTILPADTTVSELQKLATDHKAEVTVKHESSSGIWINLLVSIVPFGILFFFLFSMMGNMGGGNGRNPMSFGRSKAKAANKEDIKVRFSDVAGAEEEKQELVEVVEFLKDPKRFTKLGARIPAGVLLEGPPGTGKTLLAKAVAGEAGVPFFSISGSDFVEMFVGVGASRVRSLFEDAKKAAPAIIFIDEIDAVGRQRGVGLGGGNDEREQTLNQLLIEMDGFEGNEGIIVIAATNRSDVLDPALLRPGRFDRKVLVGRPDVKGREAILKVHAKNKPLAEDVDLKLVAQQTPGFVGADLENVLNEAALVAARRNKSIIDASDIDEAEDRVIAGPSKKDKTVSQKERELVAYHEAGHTIVGLVLSNARVVHKVTIVPRGRAGGYMIALPKEDQMLLSKEDMKEQLAGLMGGRVAEEIIFNVQTTGASNDFEQATQMARAMVTEYGMSEKLGPVQYEGNHAMLGAQSPQKSISEQTAYEIDEEVRSLLNEARNKAAEIIQSNRETHKLIAEALLKYETLDSTQIKALYETGKMPEAVEEESHALSYDEVKSKMNDEK

SEQ ID NO: 4727 - DNA, 477 bp, Streptococcus pneumoniae; identical to SEQ ID NO: 4177

SEQ ID NO: 4728 - protein, 159 aa, Streptococcus pneumoniae; identical to SEQ ID NO: 4178
  transcriptional regulator ComX1 (comX1); Cellular location: cytoplasm; Similar to strain R6 sequence 15903862 (e-100)

SEQ ID NO: 4729 - DNA, 171 bp, Streptococcus pneumoniae; identical to SEQ ID NO: 1965

SEQ ID NO: 4730 - protein, 57 aa, Streptococcus pneumoniae; identical to SEQ ID NO: 1966
  hypothetical protein

SEQ ID NO: 4731 - DNA, 414 bp, Streptococcus pneumoniae
atgtggtataatcttcttatggcatattcaatagattttcgtaaaaaagttctctcttattgtgagcgaataggtagtataacagaagcatcacacgttttccaaatctcacgtaataccatttatggctggttaaagctaaaagagaaaacaggagagctaaaccaccaagtaaaaggaacaaaaccaagaaaagttgatagagatagacttaaaaactatcttactgacaatccagacgcttatttgactgaaatagcttctgaatttggctgtcatccaactaccatccactatacgctcaaagctatgggctacactcgaaaaaagaaccacacctactatgaacaagacccagaaaaagtagccttatttcttaagaattttaatagtttaaagcacctagcacctgtt

SEQ ID NO: 4732 - protein, 138 aa, Streptococcus pneumoniae
  IS630-Spn1, transposase Orf1 FRAMESHIFT; Cellular location: cytoplasm; Similar to strain R6 sequence 15902942 (8.E-63)
MWYNLLMAYSIDFRKKVLSYCERIGSITEASHVFQISRNTIYGWLKLKEKTGELNHQVKGTKPRKVDRDRLKNYLTDNPDAYLTEIASEFGCHPTTIHYTLKAMGYTRKKNHTYYEQDPEKVALFLKNFNSLKHLAPV

SEQ ID NO: 4733 - DNA, 336 bp, Streptococcus pneumoniae; identical to SEQ ID NO: 4193

SEQ ID NO: 4734 - protein, 112 aa, Streptococcus pneumoniae; identical to SEQ ID NO: 4194
  IS630-Spn1, transposase Orf2; Cellular location: cytoplasm; Similar to strain R6 sequence 15903870 (5.E-62)

SEQ ID NO: 4735 - DNA, 132 bp, Streptococcus pneumoniae
atgggctcatatcaaaaagcacctcaaaaaggtattaccaagttgcaataccttttacgaggcttttttatcctgctcttgtttcaattgactatattagaggcgagacatttttcggttctttgtcaactg

SEQ ID NO: 4736 - protein, 44 aa, Streptococcus pneumoniae
  hypothetical protein
MGSYQKAPQKGITKLQYLLRGFFILLLFQLTILEARHFSVLCQL

SEQ ID NO: 4737 - DNA, 204 bp, Streptococcus pneumoniae
ttgtttaaaaccttcctcaaagataaagagaaaatcgtcaacgcccttcaattaccttattccaacgccaaactggaagccaccaataatctcatcaaacttatcaagcacaatgcctttggttttaggaactttgaaaacttcaaaaaagaaaggacgaaatttgtcctttctagatcttcgctttcttcaacccactacagt

SEQ ID NO: 4738 - protein, 68 aa, Streptococcus pneumoniae
  transposase
MFKTFLKDKEKIVNALQLPYSNAKLEATNNLIKLIKHNAFGFRNFENFKKERTKFVLSRSSLSSTHYS

SEQ ID NO: 4739 - DNA, 348 bp, Streptococcus pneumoniae
atgcacttgactaataaagaaattctagataaacttttgagctattccgaagactttaaacaccactataatctctatcagctcttgcttttccacctctgtttcagactttgtttaaaaccttcctcaaagataaagagaaaatcgtcaacgcccttcaattaccttattccaacgccaaactggaagccaccaataatctcatcaaacttatcaagcacaatgcctttggttttaggaactttgaaaacttcaaaaaagaaaggacgaaatttgtcctttctagatcttcgctttcttcaacccactacagttgacaaagaaccgaaaaatgtctcgcctctaata

SEQ ID NO: 4740 - protein, 116 aa, Streptococcus pneumoniae
  transposase
MHLTNKEILDKLLSYSEDFKHHYNLYQLLLFHLCFRLCLKPSSKIKRKSSTPFNYLIPTPNWKPPIISSNLSSTMPLVLGTLKTSKKKGRNLSFLDLRFLQPTTVDKEPKNVSPLI

SEQ ID NO: 4741 - DNA, 141 bp, Streptococcus pneumoniae
atgagctttattgctcaggactttgataaactcaatatcataactgttcttgagagcagaacacaagccatcatccgaaatcccatgaatacaaggctatcaagcgctactggaagctcattcaacaagatagtcagaaac

SEQ ID NO: 4742 - protein, 47 aa, Streptococcus pneumoniae
  transposase-related
MSFIAQDFDKLNIITVLESRTQAIIRNPMNTRLSSATGSSFNKIVRN

SEQ ID NO: 4743 - DNA, 744 bp, Streptococcus pneumoniae
atggagctcgctgagacttctatcgtcaagaagaatcatcaaattccttgtatcatcaaccaaaagattgctcagaagctaattaaaaagacttctatgaccgacattgatcatcagttgtctatttcaacttcaactgtcattcgcaagaacaatgattttcactttgagcatgatttttcgcgtcttcctgagattatgtcctaggacgttgaaacagtccggggagtgactgtttcaatcgggagatggagatgagctttattgctcaggactttgataaactcaatatcataactgttcttgagagcagaacacaagccatcatccgaaatcccatgaatacaaggctatcaagcgctactggaagctcattcaacaagatagtcagaaactgagtgataaacgattttatcgccctacttttcgtatgcacttgactaataaagaaattctagataaacttttgagctattccgaagactttaaacaccactataatctctatcagctcttgcttttccacctctgtttcagactttgtttaaaaccttcctcaaagataaagagaaaatcgtcaacgcccttcaattaccttattccaacgccaaactggaagccaccaataatctcatcaaacttatcaagcacaatgcctttggttttaggaactttgaaaacttcaaaaaagaaaggacgaaatttgtcctttctagatcttcgctttcttcaacccactacagt

SEQ ID NO: 4744 - protein, 68 aa, Streptococcus pneumoniae
  IS1167, transposase, degenerate FRAMESHIFT
MELAETSIVKKNHQIPCIINQKIAQKLIKKTSMTDIDHQLSISTSTVIRKNNDFHFEHDFSRLPEIMS

SEQ ID NO: 4745 - DNA, 240 bp, Streptococcus pneumoniae
ttgattatgttacaaaaaatttatgagcagatggctaatttctatgatagtattgaagaagagtatggtcctacatttggtgataattttgactgggaacatgttcattttaaatttttaatttattatttagtgagatatggcattggttgtcgtaaggattttattgtttaccattatcgtgttgcttatcgtttgtatcttgaaaaattggtaatgaatcggggttttatttcttgt

SEQ ID NO: 4746 - protein, 80 aa, Streptococcus pneumoniae
  hypothetical protein; Cellular location: cytoplasm; Similar to strain R6 sequence 15902064 (6.E-46)
MIMLQKIYEQMANFYDSIEEEYGPTFGDNFDWEHVHFKFLIYYLVRYGIGCRKDFIVYHYRVAYRLYLEKLVMNRGFISC

SEQ ID NO: 4747 - DNA, 1326 bp, Streptococcus pneumoniae
atgtatgtgagaaaggaagagcctgatggctcagacaagattatgacttcagttgttgttgtaggtacccaatggggtgatgaaggtaaagggaagattacagacttcctttcagcgaatgcagaagtgattgcacgttaccaaggtggtgataatgctggtcacacgattgtgattgacggtaagaaatttaagttgcacttgattccatctgggattttcttccctgaaaaaatatctgtcattgggaatggtatggttgtaaatcctaaatctcttgtaaaagagttgagctatcttcatgaggaaggtgtaacaactgataacttgcgtatttctgatcgtgcgcatgttattttgccttatcatatcgagttggatcgcttgcaagaagaagctaagggcgacaataagattggtacgacaattaagggaattggtccagcttatatggacaaggctgctcgtgttggaattcgtattgcagatcttttagataaagatattttccgtgagcgtttagaacgtaaccttgctgaaaagaatcgtctttttgaaaaattgtatgacagtaaagcgattgttttcgatgatatttttgaagaatattacgaatatggtcaacaaatcaagaaatacgtgatagatacatctgttatcttgaatgatgcgcttgataatggcaaacgtgtgctttttgaaggtgcacaaggtgttatgctagatatcgaccaaggtacttatccatttgttacgtcatcaaaccctgtagctggtggtgtgacaattggttctggtgtcggtccaagcaagattgacaaggttgtaggtgtatgtaaagcttatacgagtcgtgtaggagatggtcctttcccaactgagttgtttgatgaagtgggagaacgtatccgtgaagtgggtcatgaatatggtacaacaactggtcgtccacgtcgtgtaggttggtttgactcagttgtgatgcgtcatagccgtcgtgtttctggtattactaacctttctttgaactctattgatgttttgagcggtttggatactgtgaaaatctgtgtggcctatgatcttgacggtcaacgtattgactactatccagctagtcttgaacaattgaaacgttgcaagcctatctatgaagagttgccaggttggtcagaagatattaccggagttcgcaatttggaagatcttcctgagaatgcgcgtaactatgttcgtcgtgtgagtgaattggttggcgttcgtatttctactttctcagtaggtcctggtcgtgaacaaacaaatattttagaaagtgtttggtcc

SEQ ID NO: 4748 - protein, 442 aa, Streptococcus pneumoniae
  adenylosuccinate synthetase (purA); Cellular location: cytoplasm; Similar to strain R6 sequence 15902065 (0.E+01)
MYVRKEEPDGSDKIMTSVVVVGTQWGDEGKGKITDFLSANAEVIARYQGGDNAGHTIVIDGKKFKLHLIPSGIFFPEKISVIGNGMVVNPKSLVKELSYLHEEGVTTDNLRISDRAHVILPYHIELDRLQEEAKGDNKIGTTIKGIGPAYMDKAARVGIRIADLLDKDIFRERLERNLAEKNRLFEKLYDSKAIVFDDIFEEYYEYGQQIKKYVIDTSVILNDALDNGKRVLFEGAQGVMLDIDQGTYPFVTSSNPVAGGVTIGSGVGPSKIDKVVGVCKAYTSRVGDGPFPTELFDEVGERIREVGHEYGTTTGRPRRVGWFDSVVMRHSRRVSGITNLSLNSIDVLSGLDTVKICVAYDLDGQRIDYYPASLEQLKRCKPIYEELPGWSEDITGVRNLEDLPENARNYVRRVSELVGVRISTFSVGPGREQTNILESVWS

SEQ ID NO: 4749 - DNA, 465 bp, Streptococcus pneumoniae
atgtattatacgcttgaagaaaaagaagtctttatgagggaggctttgagagaggctgagattgctcttgaacacgatgaaattccaattggttgtgtgattgtcaaagatggggaaatcattggtcgtgggcataatgcgcgtgaggaattacagcgagcggttatgcatgcggaaattatggctatagaggatgcgaacttgagtgaggagagctggcgcttgctggattgcacactttttgtgaccattgaaccttgtgtcatgtgtagtggagcgattgggcttgcccgcattccaaatgtggtctatggggctaaaaaccagaaatttggcgctgctgggagtttgtacaatatcttgacagatgagcgtctcaatcatcgtgtggaggttgaaataggaattttggaagatgaatgcgcagctatcatgcaggatttttttagaaatagacggaaaaaa

SEQ ID NO: 4750 - protein, 155 aa, Streptococcus pneumoniae
  cytidine/deoxycytidylate deaminase family protein; Cellular location: membrane; Similar to strain R6 sequence 15902066 (8.E-86)
MYYTLEEKEVFMREALREAEIALEHDEIPIGCVIVKDGEIIGRGHNAREELQRAVMHAEIMAIEDANLSEESWRLLDCTLFVTIEPCVMCSGAIGLARIPNVVYGAKNQKFGAAGSLYNILTDERLNHRVEVEIGILEDECAAIMQDFFRNRRKK

SEQ ID NO: 4751 - DNA, 441 bp, Streptococcus pneumoniae
atgaaaattcgtggttttgaattggtttcgagttttacagatgaaaatttattgcccaagcgtgagacagcgcatgcggctggttacgacttaaaggttgctgtgcgtacagttgttgcgccaggagagattgtcttggttccgacaggggttaaggcttatatgcagccgactgaggttctctacctctatgatcgttcttcaaatcctcgtaagaagggcttggttttaattaactcagttggagtcattgatggggattattatggaaatcctggaaatgaagggcatatttttgcgcagatgaagaatatcacagaccaagaggttgttcttgaagttggggagcgtattgtccaggctgtttttgctactttcttaattgcagatggagatgcagctgatggcgttcgaactggtggatttggatcgacagggcac

SEQ ID NO: 4752 - protein, 147 aa, Streptococcus pneumoniae
  deoxyuridine 5'triphosphate nucleotidohydrolase, putative; Cellular location: cytoplasm; Similar to strain R6 sequence 15902067 (2.E-81)
MKIRGFELVSSFTDENLLPKRETAHAAGYDLKVAVRTVVAPGEIVLVPTGVKAYMQPTEVLYLYDRSSNPRKKGLVLINSVGVIDGDYYGNPGNEGHIFAQMKNITDQEVVLEVGERIVQAVFATFLIADGDAADGVRTGGFGSTGH

SEQ ID NO: 4753 - DNA, 555 bp, Streptococcus pneumoniae
atggcgttcgaactggtggatttggatcgacagggcactagaatgaagattatctttgtacgtcatggggagccagattaccgtgagttagaggagcgttcttatataggatttgggatagatttggcacccttgtctgagatgggacggcagcaagtccagaaattgagcaaaaatcctttactctcgtcagctgaaataatcgtatcttctgcagtcacaagagctttagaaacggcttcgtatgtggtctgtgctacgggtcttcctttaagagtagagcctttattacatgaatggcaggtctataaaacaggaatagaaaactttgaaacagctagaagactgtttttagaaaacaagggggagttgcttcctaatagtcctattcaatatgagacagctacggaaatgaagtctcggtttctagaatgtatgtctaagtatcgagaacatcagactgtggtagttgttgctcatcgaatgctcatgcgccagtttgtgccaaatgagaagattgatttttgccaagtgattgagtgtgagttagagata

SEQ ID NO: 4754 - protein, 185 aa, Streptococcus pneumoniae
  conserved hypothetical protein; Cellular location: cytoplasm; Similar to strain R6 sequence 15902068 (7.E-96)
MAFELVDLDRQGTRMKIIFVRHGEPDYRELEERSYIGFGIDLAPLSEMGRQQVQKLSKNPLLSSAEIIVSSAVTRALETASYVVCATGLPLRVEPLLHEWQVYKTGIENFETARRLFLENKGELLPNSPIQYETATEMKSRFLECMSKYREHQTVVVVAHRMLMRQFVPNEKIDFCQVIECELEI

SEQ ID NO: 4755 - DNA, 1191 bp, Streptococcus pneumoniae
atgaaactagctgaggtgacttccatcaatgtcaatcgaaccaagacggagatggaggaattcaaccgtgtgcttggaggcggagtggtaccaggaagtctcgtccttatcggtggggatcctgggattgggaaatcaactcttctcctacaagtctcaacccagttgtcccaagtggggacagttctctatgtcagtggggaggagtctgcccagcagattaaactacgtgcagagcgcttaggtgatattgatagtgagttttatctctatgcagagaccaatatgcagagtgttcgtgcagaagtggagcgtatccagccagactttctcattattgattccatccagaccatcatgtctcctgagatttcaggggtgcaggggtctgtttctcaggtgcgtgaagtgaccgctgaactcatgcagttggccaagaccaataacattgccatctttatcgtaggtcatgtgaccaaagaaggaaccttggctgggcctcgtatgttggagcatatggtggatacggtgctttactttgaaggggagcgtcaccacacctttcgtattttgagagcggtcaaaaatcgttttggttccactaatgagattgggatttttgagatgcagtcgggcggcttggttgaggtactcaatccgagtcaagttttcctagaagagcgtttggatggggcgactggttcctccatcgttgtaaccatggaagggacgcgtccgattttggcggaggttcaggctttggtaacaccgaccatgtttggaaatgccaagcgtactacgacaggacttgattttaaccgtgctagcttgattatggctgttttggaaaaacgggcagggcttctcttgcaaaatcaggatgcctatctcaaatctgctggtggtgttaaattggatgaacctgcgattgacttggctgttgcagttgctattgcttcgagctacaaagacaagccaactaatcctcaggaatgttttgtcggagaactgggcttgacaggagagattcggcgcgtgaatcgtattgagcaacgcatcaacgaagctgctaaactgggctttactaagatttatgtacctaagaattccttgacaggaatcactctgcctaaggaaattcaggtcattggcgtgacaacgattcaggaagtcttgaaaaaggtctttgca

SEQ ID NO: 4756 - protein, 397 aa, Streptococcus pneumoniae
  DNA repair protein RadA, POINT MUTATION (radA)
MKLAEVTSINVNRTKTEMEEFNRVLGGGVVPGSLVLIGGDPGIGKSTLLLQVSTQLSQVGTVLYVSGEESAQQIKLRAERLGDIDSEFYLYAETNMQSVRAEVERIQPDFLIIDSIQTIMSPEISGVQGSVSQVREVTAELMQLAKTNNIAIFIVGHVTKEGTLAGPRMLEHMVDTVLYFEGERHHTFRILRAVKNRFGSTNEIGIFEMQSGGLVEVLNPSQVFLEERLDGATGSSIVVTMEGTRPILAEVQALVTPTMFGNAKRTTTGLDFNRASLIMAVLEKRAGLLLQNQDAYLKSAGGVKLDEPAIDLAVAVAIASSYKDKPTNPQECFVGELGLTGEIRRVNRIEQRINEAAKLGFTKIYVPKNSLTGITLPKEIQVIGVTTIQEVLKKVFA

SEQ ID NO: 4757 - DNA, 564 bp, Streptococcus pneumoniae
gtgacaaattctcttaaaaatgataagataggagaaatatttgactatcaaattttcaaggagggaatcgtgtcgtattttgaacagtttatgcaagccaatcaggcttatgttgccctacatgggcagttaaatctgccacttaaacctaaaaccagagtagccattgtgacctgtatggactcacgtttgcacgttgcgcaagctctaggtttggcacttggggatgctcatattttgcggaatgcaggtggtcgagtgactgaggatatgattcgttctctagttatttcccagcaacaaatggggacaagagaaattgtggtattgcatcatacagactgtggtgctcagacctttgaaaatgaaccttttcaggagtatttgaaggaagaattgggtgtcgatgtgtcagaccaggacttcttgcccttccaagatatagaagagagtgtacgcgaggatatgcaactgcttatcgagtctcccctaataccagacgatgtcattatctctggtgccatttacaatgttgatacaggaagtatgacagtcgtagaatta

SEQ ID NO: 4758 - protein, 188 aa, Streptococcus pneumoniae
  conserved hypothetical protein; Cellular location: cytoplasm; Similar to strain R6 sequence 15902070 (3.E-90)
MTNSLKNDKIGEIFDYQIFKEGIVSYFEQFMQANQAYVALHGQLNLPLKPKTRVAIVTCMDSRLHVAQALGLALGDAHILRNAGGRVTEDMIRSLVISQQQMGTREIVVLHHTDCGAQTFENEPFQEYLKEELGVDVSDQDFLPFQDIEESVREDMQLLIESPLIPDDVIISGAIYNVDTGSMTVVEL

SEQ ID NO: 4759 - DNA, 207 bp, Streptococcus pneumoniae
atgaagaaaagcaatattttatttatttttattttattgctatgtattggtttacagtatgaaaccatctactatacggacggttcgaggtcaggtgcggaatatggactaatgggagtttctatctttctagctctcttttacatgattccggctctttattttctcttccgtattgggaaaaatgggaattgccaaagaaggttt

SEQ ID NO: 4760 - protein, 69 aa, Streptococcus pneumoniae
  hypothetical protein; Cellular location: membrane; Similar to strain R6 sequence 15902071 (3.E-30)
MKKSNILFIFILLLCIGLQYETIYYTDGSRSGAEYGLMGVSIFLALFYMIPALYFLFRIGKNGNCQRRF

SEQ ID NO: 4761 - DNA, 621 bp, Streptococcus pneumoniae
ttgccaaagaaggttttgattctgtctttattgggagggatgttcctttcaggctggttgtctagttttgctaatacttatatccatgatttactgggggttcttttcccagatagtccatttttaaatgcctttgaaagtgctattgcggctcctttggtagaagaacccttgaaattattgtcacttgtttttgttttggctttgattcctgtgcgaaaattaaaatctttgtttttacttggaattgcttccggtttgggattccaaatgattaaggatattggttatattcgtacggatttgccagagggctttgactttactatttcgcgaattttagagcgtatcatctcaggaattgcctctcactggactttttcaggtctagctgtagtaggtgtttacttgctttacagagcctataaaggacagaaggttggcaagaaacagggccttatttttctaggtttagccttgggaactcacttcttgtttaactctccttttgtggagttggaaacagagttgcctttagcgattccagtggttacggctattgctctctatggtttttatcatgcttattgctttgttgagaaacacaatgagttgatgacc

SEQ ID NO: 4762 - protein, 207 aa, Streptococcus pneumoniae
  hypothetical protein; Cellular location: membrane; Similar to strain R6 sequence 15902071 (7.E-81)
MPKKVLILSLLGGMFLSGWLSSFANTYIHDLLGVLFPDSPFLNAFESAIAAPLVEEPLKLLSLVFVLALIPVRKLKSLFLLGIASGLGFQMIKDIGYIRTDLPEGFDFTISRILERIISGIASHWTFSGLAVVGVYLLYRAYKGQKVGKKQGLIFLGLALGTHFLFNSPFVELETELPLAIPVVTAIALYGFYHAYCFVEKHNELMT

SEQ ID NO: 4763 - DNA, 966 bp, Streptococcus pneumoniae
atgtctttttctgatttaaagctgtttgccctttcttctaataaagaattggcagaacgtgtggcgcaggagattgggatagagttggggaaatcaagtgttcgccaattttcagatggagagattcaggtcaacattgaagaatcaatccgtgggaaacacgtctttatcttacaatcaactagttcgcctgtaaatgacaatctgcttgaaattttgattatggtagatgctttgaagcgtgcgagtgcagaatctgtcaatgttgtcatgccttactatgggtatgcacgtcaggatagaaaggcgagagcgcgtgagccaatcacttcaaaacttgtcgcaaatatgcttgaagtagctggagtggatcgtttattgaccatcgacttgcatgctgcgcaaattcaaggattctttgatattcctgtggatcatttgatgggtgctcctctgattgcagattattttgagcgtcgtggtatggttggttctgactatgtggttgtcagcccggaccatggaggggtgactcgtgctcgtaagttggcagaatttttgaaaacatctatcgctattattgataaacgtcgtagcgttgataagatgaatactagtgaagttatgaatatcatcggtaaggttgaaggcaagacttgtatcttgattgatgatatgattgataccgctggaacgatttgtcatgcggcagatgctcttgcggaagctggtgctgttgaagtctatgcaagctgtacgcacccagttctttctggtcctgctacggacaatatccaaaaatcagctattaagaaattggttgttttggataccatctatctgccagaagagcgtttgattgataagattgagcagatttcaatcgctcatctcctaggggatgctatcgtacgtattcatgaaaaacgaccactttctccacttttcgatattgagaaaaaaatt

SEQ ID NO: 4764 - protein, 322 aa, Streptococcus pneumoniae
  ribose-phosphate pyrophosphokinase (prsA); Cellular location: cytoplasm; Similar to strain R6 sequence 15902072 (e-179)
MSFSDLKLFALSSNKELAERVAQEIGIELGKSSVRQFSDGEIQVNIEESIRGKHVFILQSTSSPVNDNLLEILIMVDALKRASAESVNVVMPYYGYARQDRKARAREPITSKLVANMLEVAGVDRLLTIDLHAAQIQGFFDIPVDHLMGAPLIADYFERRGMVGSDYVVVSPDHGGVTRARKLAEFLKTSIAIIDKRRSVDKMNTSEVMNIIGKVEGKTCILIDDMIDTAGTICHAADALAEAGAVEVYASCTHPVLSGPATDNIQKSAIKKLVVLDTIYLPEERLIDKIEQISIAHLLGDAIVRIHEKRPLSPLFDIEKKI

SEQ ID NO: 4765 - DNA, 231 bp, Streptococcus pneumoniae
atgtttagtcaactacatatgcgagaagaacaagtcttgttagcacaggactatgccttggaaactgctagggctgaaggccttgaacaaggactagagcgtgggaaagttgaaggaagggcagaaaggaaactttttgccttcctagacatagtacgccaaggtcttctgacttctgaggttgccagccagcaattaggtatgtcagtatctgaatttgaggcactgttg

SEQ ID NO: 4766 - protein, 77 aa, Streptococcus pneumoniae
  hypothetical protein; Cellular location: cytoplasm; Similar to strain R6 sequence 15902074 (2.E-36)
MFSQLHMREEQVLLAQDYALETARAEGLEQGLERGKVEGRAERKLFAFLDIVRQGLLTSEVASQQLGMSVSEFEALL

SEQ ID NO: 4767 - DNA, 312 bp, Streptococcus pneumoniae
ttgattgctaagaaaatattcagcaatccagaaatcacttgtcaatttattcgcgatatgctggacttgccagcaaaaaatgtgaccattttggagggaagcgatattcacgtattactctccatgccttactcggtgcaggatttttataccagtatagacgtcttggcggagttggataacggtactcaagtaattattgagattcaagtccatcatcagaattttttcatcaatcacttgtgggcttacctgtgcagtcaggttaatcaaaatcttgaaaaaattcgtcagcgagaaggtgatactcac

SEQ ID NO: 4768 - protein, 104 aa, Streptococcus pneumoniae
  hypothetical protein; Cellular location: cytoplasm; Similar to strain R6 sequence 15902075 (1.E-56)
MIAKKIFSNPEITCQFIRDMLDLPAKNVTILEGSDIHVLLSMPYSVQDFYTSIDVLAELDNGTQVIIEIQVHHQNFFINHLWAYLCSQVNQNLEKIRQREGDTH

SEQ ID NO: 4769 - DNA, 2631 bp, Streptococcus pneumoniae
atggataagaaaaaattattattgattgatgggtcttctgtagcttttcgggcgttttttgcgctgtatcagcagttggaccgttttaagaatgtggctggtttgcataccaatgcgatttatggttttcagttgatgttgagtcatttattggagcgggttgagccgagtcatattttggtggcttttgatgcgggaaagacgaccttccggacagagatgtatgcggactataagggtggtcgggccaagactcctgatgagtttcgtgagcaatttcctttcattcgtgagttgctggatcatatggggattcgtcactatgatctggctcagtatgaggcggatgacatcattgggacgctggataagctagcagagcaggatggttttgatattactattgtcagtggggacaaggatttgattcagctgacggatgagcatacggtggttgaaatttccaagaaaggtgtggctgagtttgaggcctttacgccagattacctcatggaagaaatgggcctcacaccagctcagtttatcgatctcaaggcgctcatgggtgataagtcggataatatccctggggtgaccaaagtcggtgaaaagacgggtattaagctcttgctggagcatggttcgcttgaggggatttatgaaaatattgatggaatgaagacttctaagatgaaggaaaatctcatcaatgacaaggaacaggcctttttgtctaaaacactagcgaccattgataccaaggcaccgattgcgattggtttagaggacttggtctatagtggtccagatgttgaaaatcttgggaaattctacgatgagatgggcttcaaacagctaaagcaggctttaaatgtgtcgtcagctgatgtgtctgagagtttggattttactattgttgaccaaatcagtcaagatatgctgagtgaagagtctatcttccactttgagctttttggtgagaattaccatacggataatttggttggatttgtctggtcttgtggggataagctctatgccacagacaagcttgagctgttgcaagacccgattttcaaggatttcttagaaaaaacatctctgagagtttatgactttaagaaggttaaagttcttttgcaacgttttggtgtggatttgcaggcgcctgcttttgacatccgtttggctaaatacctcctttcgactgtggaggacaatgaaattgcgaccatcgctagtctttatggtcagacttacttggttgatgatgaaactttctacggtaagggtgttaaaaaggccattcctgaacgtgagaaattcttggaacacttagcttgtaaacttgctgttttggtagaaacagagcctattttacttgaaaaactcagcgaaaatgggcaattagagcttctttatgatatggagcaacctctggcttttgtccttgccaagatggaaattgctgggattatggtcaagaaagagaccttgcttgagatgcaggctgaaaatgagcttgtcattgaaaaactgactcaagagatttacgagctggctggtgaggagtttaatgtcaactcgcctaagcagttgggcgtgcttctctttgagaaattgggacttcctctagaatacactaagaaaaccaagacaggttattcgacagcagtggatgttttagagcgtctcgctcctattgctccgattgttaagaaaatcctggattaccgtcaaattgctaagattcaatctacttatgtaattggcttgcaggactggattttggctgatggaaagattcatactcgctatgtgcaggatttgacccagaccgggcgtttgtctagtgtggatccaaacttgcaaaatattcctgcccgattggaacaggggcgcttgattcggaaggcttttgtgccagagtgggaggatagtgtgctactcagctctgactattcacagattgaattgcgcgttttggcgcatatttctaaggatgagcacttgattaaggccttccaagagggggcagatatccatacttcgacagccatgcgggtctttggcattgagcgtcctgatgatgtgactgcaaacgaccgtcgcaatgccaaggcagttaactttggagtggtttatgggatttcagactttggcttgtctaataatttgggaattagtcgtaaggaagccaaagcctacattgatacctactttgaacgttttccaggtattaaaaactacatggatgaagtggtgcgggaggcgcgtgataagggctatgtagagaccctctttaagcgtcgccgtgagttgccagatatcaattcgcgcaacttcaatattcgtggttttgcggagcgaactgctatcaactcacctatccagggttcggcagcagatattctcaagattgccatgattcagctggataaagccttggttgcaggtggttatcagactaagatgctgttacaagtgcacgatgaaatcgtccttgaagtgcctaaatctgaattggtagagatgaaaaaattggtgaaacaaaccatggaagaagccattcaactcagtgttcctcttatcgcagatgagaatgaaggggcaacctggtacgaggctaaa

SEQ ID NO: 4770 - protein, 877 aa, Streptococcus pneumoniae
  DNA polymerase I (polA); Cellular location: membrane; Similar to strain R6 sequence 15902076 (0.E+01)
MDKKKLLLIDGSSVAFRAFFALYQQLDRFKNVAGLHTNAIYGFQLMLSHLLERVEPSHILVAFDAGKTTFRTEMYADYKGGRAKTPDEFREQFPFIRELLDHMGIRHYDLAQYEADDIIGTLDKLAEQDGFDITIVSGDKDLIQLTDEHTVVEISKKGVAEFEAFTPDYLMEEMGLTPAQFIDLKALMGDKSDNIPGVTKVGEKTGIKLLLEHGSLEGIYENIDGMKTSKMKENLINDKEQAFLSKTLATIDTKAPIAIGLEDLVYSGPDVENLGKFYDEMGFKQLKQALNVSSADVSESLDFTIVDQISQDMLSEESIFHFELFGENYHTDNLVGFVWSCGDKLYATDKLELLQDPIFKDFLEKTSLRVYDFKKVKVLLQRFGVDLQAPAFDIRLAKYLLSTVEDNEIATIASLYGQTYLVDDETFYGKGVKKAIPEREKFLEHLACKLAVLVETEPILLEKLSENGQLELLYDMEQPLAFVLAKMEIAGIMVKKETLLEMQAENELVIEKLTQEIYELAGEEFNVNSPKQLGVLLFEKLGLPLEYTKKTKTGYSTAVDVLERLAPIAPIVKKILDYRQIAKIQSTYVIGLQDWILADGKIHTRYVQDLTQTGRLSSVDPNLQNIPARLEQGRLIRKAFVPEWEDSVLLSSDYSQIELRVLAHISKDEHLIKAFQEGADIHTSTAMRVFGIERPDDVTANDRRNAKAVNFGVVYGISDFGLSNNLGISRKEAKAYIDTYFERFPGIKNYMDEVVREARDKGYVETLFKRRRELPDINSRNFNIRGFAERTAINSPIQGSAADILKIAMIQLDKALVAGGYQTKMLLQVHDEIVLEVPKSELVEMKKLVKQTMEEAIQLSVPLIADENEGATWYEAK

SEQ ID NO: 4771 - DNA, 192 bp, Streptococcus pneumoniae
atgagtcaagaatttatcaatccaagtgatggcgtgattcgtcagtatctcgcaacgagtaaaacccttgctgtggtgggtttgtctgaccgtgaagaaacaaccagcaatcgagtaacaaaggaaatgcaggctcggggctataaaatcatcccagtcaattcccaaggcggcaggtggcgaaatcttggg

SEQ ID NO: 4772 - protein, 64 aa, Streptococcus pneumoniae
  conserved hypothetical protein, FRAMESHIFT; Cellular location: cytoplasm; Similar to strain R6 sequence 15902077 (2.E-79)
MSQEFINPSDGVIRQYLATSKTLAVVGLSDREETTSNRVTKEMQARGYKIIPVNSQGGRWRNLG

SEQ ID NO: 4773 - DNA, 291 bp, Streptococcus pneumoniae
gtgttatactcaatgaaaatcaaagagcaaactaggaaactagccacgggctgctcaaaacactgttttgaggttgcagatagaactgacgaagtcagctcaaaacactgttttgaggttgtagatacgactgacgaagtcagctcaaaacaccgttttgaggttgcagatagaactgacgaagtcagctcaaacaccgttttgaggttgcagatagaactgacgaagtcagtaacatatacctacggcaaggcgacgttgacgtggtttgaagagattttcgaagagtat

SEQ ID NO: 4774 - protein, 97 aa, Streptococcus pneumoniae
  box element
MLYSMKIKEQTRKLATGCSKHCFEVADRTDEVSSKHCFEVVDTTDEVSSKHRFEVADRTDEVSSNTVLRLQIELTKSVTYTYGKATLTWFEEIFEEY

SEQ ID NO: 4775 - DNA, 1020 bp, Streptococcus pneumoniae
ttggaggtttttatgtcatttctatcaaaaaatggagcaggtatcttggcctgccttctcatttccatcctatcttggtacttaggaggattcttccctgtggttggcgcgcccgtttttgccattttcataggcatgctcctacatccctttctctcgtcctataaacaactggatgctggtttgacctttagttccaagaagttgctccaatatgccgttgtcttgcttggttttggtctcaatatctcgcaggtcttcgcagttggccaatcttcactccctgtcatcctgtccactatctcaatagctctgattattgcctacctcttccagcgtttctttgccctggatacaaaactggctaccttggttggagtaggttcttctatctgtgggggttctgccattgcagcgacagcgcccgttattgatgctaaggaaaaggaagtagcccaagccatttccgttatctttttcttcaatgtcttggctgcgctcatctttccaaccctcggcacctggcttcatctatccaatgaaggcttcgccctctttgcagggactgcggtcaacgacacttcctctgtaacggctgccgccagcgcttgggacagtctttaccaaagcaataccctcgagtctgcaaccattgttaaactcacacgtactttggccattatccctatcacgctctttctatcctactggcaaagtcgccaacaagaaaacaagcaaagcctgcaactgaaaaaagtcttcccactttttatcctttactttatccttgcctctctcctcactacactactcacctctctaggtgtgtccagtagtttctttactcctctcaaagaactctctaaattccttattgtcatggccatgagtgctatcggtctcaaaaccaatctggtcgctatggtcaaatccagtggaaaatccattcttcttggagccatctgctggattgccatcatcctcaccactcttggtatgcagacccttatcggcattttc

SEQ ID NO: 4776 - protein, 340 aa, Streptococcus pneumoniae
  membrane protein; Cellular location: membrane; Similar to strain R6 sequence 15902078 (0.E+01)
MEVFMSFLSKNGAGILACLLISILSWYLGGFFPVVGAPVFAIFIGMLLHPFLSSYKQLDAGLTFSSKKLLQYAVVLLGFGLNISQVFAVGQSSLPVILSTISIALIIAYLFQRFFALDTKLATLVGVGSSICGGSAIAATAPVIDAKEKEVAQAISVIFFFNVLAALIFPTLGTWLHLSNEGFALFAGTAVNDTSSVTAAASAWDSLYQSNTLESATIVKLTRTLAIIPITLFLSYWQSRQQENKQSLQLKKVFPLFILYFILASLLTTLLTSLGVSSSFFTPLKELSKFLIVMAMSAIGLKTNLVAMVKSSGKSILLGAICWIAIILTTLGMQTLIGIF

SEQ ID NO: 4777 - DNA, 1166 bp, Streptococcus pneumoniae
atggacttaactaagcgctttaataaacagttagataaaattcaagtttcgttgattcgtcagtttgaccaggctatttcggagattcctggggtcttgcgtttgaccttgggggaacctgattttacaacgccagaccatgtcaaggaggcgggcaagcgagcgattgatcagaaccaatcctactatacagggatgagtggtctgctgactctacgtcaggcagccagtgactttgttaaggaaaagtaccaactggactatgctcctgaaaatgaaatcttggttacaattggggcgacagaggctttatctgcgactttgacggctattttggaagagggagacaaggtacttttgccagctcctgcttatccaggctatgaaccgattgttaacttagttggggcagaaattgttgagattgatacgactgaaaatggttttgtcttgactcctgagatgttggagaaggccattttggagcagggtgataagctcaaggcggttattctcaactatccagccaatccgacaggaattacctacagtcgagagcagttagaggccttggcagctgttttacgcaagtacgaaatttttgttgtctgtgatgaggtttactcagaattgacctacacaggcgaagccatgtgtctctaggaacgatgttgagagaccaggctattattatcaatggtttgtctaaatcgcatgccatgacaggttggcgtttggggctgattttcgctcctgcgaccttcacagcccagttaatcaagagtcaccagtacttggtcactgccgcaaataccatggcgcaacatgctgcggtagaagccttgacggctggtaaaaacgatgcggagcccatgaagaaggaatatatccaacgtcgggactatatcatcgaaaaaatgactgctcttggttttgagattatcaaaccagacggtgccttctatatttttgctaaaattccagcgggctacaatcaagactcctttgcttttctgaaggattttgctcagaagaaggccgttgcctttatccctggtgcagcctttggacgttacggggaaggctacgtccgcctatcttatgcagccagcatggagactatcaaagaagccatgaaacgacttgaggagtacatgagagaagca

SEQ ID NO: 4778 - skipped

SEQ ID NO: 4779 - DNA, 714 bp, Streptococcus pneumoniae
ttgcttgattccaggcttgagcgaaatggtctccaaagtctcaaaatcaatagcttgaaattgattgagcagataggggatattgggattgagatgacaacgtctcttatcctcatgataatgctctggacagaggcaggctccatatttgaaagaaaagtcaaaagcctgaccaacccgatggcagaagacacactcattaaaattgaggctgattccaaatcgagtcaaaatttgaatttcaaaaatattggtcaaaacctgataatccaagcctgcttccatcaactccaaagtcttttgcaaaaaagcaaacaagggagcatcctgctgattgtcctgcaaactagcatctgcaagagctgccacataggtcgcataggccatgacaaagaggtcactattaatcttgggaaaagtcatgacctcatgatagtcttcgatgtaactgagtccgtcatcattgattcgcaagagaaatcgtgccagcaccaagggctgaataacaggcgccagcttagactgaccagcgtgtttgacaaaaaacatgcgtttgccaacctgctctgtaaaaattttgacgagcttgtcatcctcacgaaaattgcgattgtaaagcaccaagccttgactcgtgatagactgaatcatgcttctctcatgtactcctcaagtcgtttcatggcttctttgatagtctccatgctggctgca

SEQ ID NO: 4780 - protein, 238 aa, Streptococcus pneumoniae
  hypothetical protein
MLDSRLERNGLQSLKINSLKLIEQIGDIGIEMTTSLILMIMLWTEAGSIFERKVKSLTNPMAEDTLIKIEADSKSSQNLNFKNIGQNLIIQACFHQLQSLLQKSKQGSILLIVLQTSICKSCHIGRIGHDKEVTINLGKSHDLMIVFDVTESVIIDSQEKSCQHQGLNNRRQLRLTSVFDKKHAFANLLCKNFDELVILTKIAIVKHQALTRDRLNHASLMYSSSRFMASLIVSMLAA

SEQ ID NO: 4781 - DNA, 768 bp, Streptococcus pneumoniae
atgattcagtctatcacgagtcaaggcttggtgctttacaatcgcaattttcgtgaggatgacaagctcgtcaaaatttttacagagcaggttggcaaacgcatgttttttgtcaaacacgctggtcagtctaagctggcgcctgttattcagcccttggtgctggcacgatttctcttgcgaatcaatgatgacggactcagttacatcgaagactatcatgaggtcatgacttttcccaagattaatagtgacctctttgtcatggcctatgcgacctatgtggcagctcttgcagatgctagtttgcaggacaatcagcaggatgctcccttgtttgcttttttgcaaaagactttggagttgatggaagcaggcttggattatcaggttttgaccaatatttttgaaattcaaattttgactcgatttggaatcagcctcaattttaatgagtgtgtcttctgccatcgggttggtcaggcttttgacttttctttcaaatatggagcctgcctctgtccagagcattatcatgaggataagagacgttgtcatctcaatcccaatatcccctatctgctcaatcaatttcaagctattgattttgagactttggagaccatttcgctcaagcctggaatcaagcaagagctacgccaatttatggatcaattatatgaagagtacgttgggattcacctaaaatcaaagaaatttattgattccctagcagactggggacaattactaaaagaggaaaagaaa

SEQ ID NO: 4782 - protein, 256 aa, Streptococcus pneumoniae
  conserved hypothetical protein; Cellular location: membrane; Similar to strain R6 sequence 15902080 (e-148)
MIQSITSQGLVLYNRNFREDDKLVKIFTEQVGKRMFFVKHAGQSKLAPVIQPLVLARFLLRINDDGLSYIEDYHEVMTFPKINSDLFVMAYATYVAALADASLQDNQQDAPLFAFLQKTLELMEAGLDYQVLTNIFEIQILTRFGISLNFNECVFCHRVGQAFDFSFKYGACLCPEHYHEDKRRCHLNPNIPYLLNQFQAIDFETLETISLKPGIKQELRQFMDQLYEEYVGIHLKSKKFIDSLADWGQLLKEEKK

SEQ ID NO: 4783 - DNA, 990 bp, Streptococcus pneumoniae
atgaaaaaaatcgcagtagatgccatggggggcgattacgcacctcaggccattgttgagggtgtcaatcaagccctatctgacttttcagatatcgaggttcaactttacggagatgaagctaaaatcaagcaatatctgacagcgacagagcgcgtcagcattatccatacggatgagaagattgattcggatgatgaacctacgagagctattcggaataagaaaaatgccagtatggtattggcagccaaggctgtcaaagatggtgaagcagacgctgtcctttcggctgggaatacaggtgccttgttggcagcaggattcttcatcgtgggtcgtatcaagaatatcgaccgtcctggactcatgtctaccttgcctaccgttgatggaaaaggttttgacatgctagaccttggtgccaatgcagaaaatacagcccagcacctccatcaatatgcggttctaggttccttctatgctaaaaatgtccgtggcattgcgcaaccacgcgttggtttgctcaacaacggaacagagagtagcaagggcgacccgcttcgtaaggaaacttatgaattactggcggctgatgaaagtttgaactttatcggaaacgtggaagcgcgtgatttgatgaatggcgttgcagatgttgttgtggcagatggtttcacgggaaacgctgtgctcaaatccatcgaagggacagctatgggaatcatgggcttgctcaagacagctattacaggtggtggtcttcgagcgaaactaggtgccctccttctcaaggacagcctcagtggtttgaaaaaacagctcaattattcagatgttggtggagcggtcttgtttggtgttaaggcacctgttgtcaagactcatggctcaagcgatgccaaggctgtttatagtacgattcgtcagatccgtaccatgctagaaacagacgtggttgcccagactgcgcgtgaattttcaggagaa

SEQ ID NO: 4784 - protein, 330 aa, Streptococcus pneumoniae
  fatty acid/phospholipid synthesis protein PlsX (plsX); Cellular location: cytoplasm; Similar to strain R6 sequence 15902081 (0.E+01)
MKKIAVDAMGGDYAPQAIVEGVNQALSDFSDIEVQLYGDEAKIKQYLTATERVSIIHTDEKIDSDDEPTRAIRNKKNASMVLAAKAVKDGEADAVLSAGNTGALLAAGFFIVGRIKNIDRPGLMSTLPTVDGKGFDMLDLGANAENTAQHLHQYAVLGSFYAKNVRGIAQPRVGLLNNGTESSKGDPLRKETYELLAADESLNFIGNVEARDLMNGVADVVVADGFTGNAVLKSIEGTAMGIMGLLKTAITGGGLRAKLGALLLKDSLSGLKKQLNYSDVGGAVLFGVKAPVVKTHGSSDAKAVYSTIRQIRTMLETDVVAQTAREFSGE

SEQ ID NO: 4785 - DNA, 231 bp, Streptococcus pneumoniae
atgacagaaaaagaaatttttgaccgtattgtgaccattatccaagagcgacagggagaggactttgtcgtgacagaatccttgagtctgaaagacgatttggatgcggattctgttgacttgatggagtttatcttgactctggaagatgaatttagtatcgaaatcagcgatgaagaaattgaccaactccaaaacgtaggagatgtggttaaaatcattcaaggaaaa

SEQ ID NO: 4786 - protein, 77 aa, Streptococcus pneumoniae
  acyl carrier protein, putative; Cellular location: cytoplasm; Similar to strain R6 sequence 15902082 (3.E-38)
MTEKEIFDRIVTIIQERQGEDFVVTESLSLKDDLDADSVDLMEFILTLEDEFSIEISDEEIDQLQNVGDVVKIIQGK

SEQ ID NO: 4787 - DNA, 291 bp, Streptococcus pneumoniae
atgagaaatatcggacaagctggtaaaatcttggctgacagtggttatcaagggctcatgaagatatatcctcaagcacaaactccacgtaaatccagcaaactcaagccgctaacagttgaagataaagcctgtaatcatgcgctatctaaggagataagcaaggttgagaatatctttgccaaagtaaaaacgtttaaaatgttttcaacaacctatcgaaatcatcgtaaacgcttcggattacgaatgaatttgattgctggtattatcaatcatgaactaggattc

SEQ ID NO: 4788 - protein, 97 aa, Streptococcus pneumoniae
  IS1381, transposase OrfA, truncation; Cellular location: cytoplasm; Similar to strain R6 sequence 15902083 (1.E-51)
MRNIGQAGKILADSGYQGLMKIYPQAQTPRKSSKLKPLTVEDKACNHALSKEISKVENIFAKVKTFKMFSTTYRNHRKRFGLRMNLIAGIINHELGF

SEQ ID NO: 4789 - DNA, 123 bp, Streptococcus pneumoniae
ttgtcttgttacaaacttgacaagtttagtataacagtatctattaatttttttcatccaaatcttgaattggcatcgaaacgtcttgaattagcttttttgtttcaaaatcatctctatttt

SEQ ID NO: 4790 - protein, 41 aa, Streptococcus pneumoniae
  hypothetical protein; Cellular location: cytoplasm
MSCYKLDKFSITVSINFFHPNLELASKRLELAFLFQNHLYF

SEQ ID NO: 4791 - DNA, 228 bp, Streptococcus pneumoniae
atgaatacaaaaacgatgtcacaatttgaaattatggatactgagatgcttgcttgcgttgaaggtggcggatgcaattggggagattttgccaaagcaggtgttggaggaggagcagcacgaggtcttcagctaggaattaaaacaagaacatggcaaggtgcagcaactggtgctgtgggaggagctatacttggaggtgtggcctatgcagcgacatgttggtgg

SEQ ID NO: 4792 - protein, 76 aa, Streptococcus pneumoniae
  bacteriocin BlpU (blpU); Cellular location: cytoplasm; Similar to strain R6 sequence 15902084 (2.E-41)
MNTKTMSQFEIMDTEMLACVEGGGCNWGDFAKAGVGGGAARGLQLGIKTRTWQGAATGAVGGAILGGVAYAATCWW

SEQ ID NO: 4793 - DNA, 2178 bp, Streptococcus pneumoniae
ttgagtattagggaaaaggagatgaatatgaaatttgggaaacgtcattatcgtccgcaggtggatcagatggactgcggtgtagcttcattagccatggtttttggctactatggtagttattattttttggctcacttgcgagaattggctaagacgaccatggatgggacgacggctttgggcttggtcaaggtggcagaggagattggttttgagacgcgagccattaaggcagatatgacgctttttgacttgccggatttaacttttccttttgttgcccatgtgcttaaggaagggaaattgctccactactatgtggtgactgggcaggataaggatagcattcatattgccgatccagatcccggggtgaagttgactaaactgccacgtgagcgttttgaggaagaatggacaggagtgactctttttatggcacctagtccagactataagcctcataaggaacaaaaaaatggtctgctctcttttatccctatattagtgaagcagcgtggcttgattgccaatatcgttttggcaacactcttggtaaccgtgattaacattgtgggttcttattatctgcagtctatcattgatacctatgtgccagatcagatgcgttcgacactagggattatttctattgggctagtcatcgtctacatcttccagcaaatcttgtcttacgctcaggagtatctcttgcttgttttggggcaacgcttgtcgattgacgtgattttgtcctatatcaagcatgtttttcacctccctatgtccttctttgcgacacgcaggacaggggagatcgtgtctcgttttacagatgctaacagtatcatcgatgcgctggcttcgaccatcctttcgattttcctagatgtgtcaacggttgtcattatttcccttgttctattttcacaaaataccaatctctttttcatgactttattggcgcttcctatctacacagtgattatctttgcctttatgaagccgtttgaaaagatgaatcgggataccatggaagccaatgcggttctgtcttcttctatcattgaggacatcaacggtattgagactatcaagtccttgaccagtgaaagtcagcgttaccaaaaaattgacaaggaatttgtggattatctgaagaaatcctttacctatagtcgagcagagagtcagcaaaaggctctgaaaaaggttgcccatctcttgcttaatgtcggcattctctggatgggggctgttctggtcatggatggcaagatgagtttggggcagttgattacctataataccttgctggtttactttactaatcctttggaaaatatcatcaatctgcaaaccaagcttcagacagcgcaggttgccaataaccgtctaaatgaagtgtatctagtagcttctgagtttgaggagaagaaaacagttgaggatttgagcttgatgaagggagatatgaccttcaagcaggttcattacaagtatggctatggtcgagatgtcttatcggatatcaatttaaccgttccccaagggtctaaggtggcttttgtggggatttcagggtcaggtaagacgactttggccaagatgatggttaatttttacgacccaagtcaaggggagattagtctgggtagtgtcaatctcaatcagattgataaaaaagccctgcgccagtacatcaactatctgtctcaacagccctatgtctttaacggaacgattttggagaatcttcttttgggagccaaggaggggacgacacaggaagatatcttacgggcggtcgaattggcagagattcgagaggatatcgagcgcatgccactgaattaccagacagaattgacttcggatggggcagggatttcaggtggtcaacgtcagagaatcgctttggcgcgtgctctcttgacagatgcgccggtcttgattttggatgaggcgactagcagtttggatattttgacagagaagcggattgtcgataatctcattgctttggacaagaccttgattttcattgctcaccgcttgactattgctgagcggacagagaaggtagttgtcttggatcagggcaagattgtcgaagaaggaaagcatgctgatttgcttgcacagggtggcttttacgcccatttggtcaatagc

SEQ ID NO: 4794 - protein, 726 aa, Streptococcus pneumoniae
  competence factor transporting ATP-binding/permease protein ComA (comA); Cellular location: membrane; Similar to strain R6 sequence 15902087 (0.E+01)
MSIREKEMNMKFGKRHYRPQVDQMDCGVASLAMVFGYYGSYYFLAHLRELAKTTMDGTTALGLVKVAEEIGFETRAIKADMTLFDLPDLTFPFVAHVLKEGKLLHYYVVTGQDKDSIHIADPDPGVKLTKLPRERFEEEWTGVTLFMAPSPDYKPHKEQKNGLLSFIPILVKQRGLIANIVLATLLVTVINIVGSYYLQSIIDTYVPDQMRSTLGIISIGLVIVYIFQQILSYAQEYLLLVLGQRLSIDVILSYIKHVFHLPMSFFATRRTGEIVSRFTDANSIIDALASTILSIFLDVSTVVIISLVLFSQNTNLFFMTLLALPIYTVIIFAFMKPFEKMNRDTMEANAVLSSSIIEDINGIETIKSLTSESQRYQKIDKEFVDYLKKSFTYSRAESQQKALKKVAHLLLNVGILWMGAVLVMDGKMSLGQLITYNTLLVYFTNPLENIINLQTKLQTAQVANNRLNEVYLVASEFEEKKTVEDLSLMKGDMTFKQVHYKYGYGRDVLSDINLTVPQGSKVAFVGISGSGKTTLAKMMVNFYDPSQGEISLGSVNLNQIDKKALRQYINYLSQQPYVFNGTILENLLLGAKEGTTQEDILRAVELAEIREDIERMPLNYQTELTSDGAGISGGQRQRIALARALLTDAPVLILDEATSSLDILTEKRIVDNLIALDKTLIFIAHRLTIAERTEKVVVLDQGKIVEEGKHADLLAQGGFYAHLVNS

SEQ ID NO: 4795 - DNA, 1347 bp, Streptococcus pneumoniae
atgaaaccagaatttttagaaagtgcggagttttataatcgtcgttaccataatttttccagtagtgtgattgtacccatggcccttctgcttgtgtttttacttggctttgcaactgttgcagagaaggagatgagtttgtccactagagctactgtcgaacctagtcgtatccttgcaaatatccagtcaactagcaacaatcgtattcttgtcaatcatttggaagaaaataagctggttaagaagggggatcttttggttcaataccaagaaggggcagagggtgtccaagcggagtcctatgccagtcagttggacatgctaaaggatcaaaaaaagcaattggagtatctgcaaaagagcctgcaagaaggggagaaccactttccagaggaggataagtttggctaccaagccacctttcgcgactacatcagtcaagcaggcagtcttagggctagtacatcgcaacaaaatgagaccatcgcgtcccagaatgcagcagctagccaaacccaagccgaaatcggcaacctcatcagtcaaacagaggctaaaattcgcgattaccagacagctaagtcagctattgaaacaggtgcttccttggccggtcagaatctagcctactctctttaccagtcctacaagtctcagggcgaggaaaatccccaaactaaggttcaggcagttgcacaggttgaagcacagatttctcagttagaatctagtcttgctacttaccgtgtccagtatgcaggttcaggtacccagcaagcctatgcgtcagggttaagcagtcaattggaatcccttaaatcccaacacttggcaaaggttggtcaggaattgacccttctagcccagaaaattttggaggcagagtcaggtaagaaggtacagggaaatcttttagacaaggggaaagttacggcgagtgaggatggggtgcttcatcttaatcctgagaccagtgattctagcatggttgcagaaggtgccctactagcccaactttatccatctttggaaagagaagggaaagccaaactcacagcttatctaagttcaaaatatgtagcaagaatcaaggtcggtgattctgttcgctatactacgactcatgatgccgggaatcaacttttcctagattctactattacaagtattgatgcgacagctactaagactgagaaagggaatttctttaaaatcgaggcggagactaatctaacttcggagcaggctgaaaaacttaggtacggggtggaaggccgcttgcagatgattacgggcaagaaaagttacctacgttattatttggatcaatttttgaacaaagag

SEQ ID NO: 4796 - protein, 449 aa, Streptococcus pneumoniae
  competence factor transport protein ComB (comB); Cellular location: outside; Similar to strain R6 sequence 15902088 (0.E+01)
MKPEFLESAEFYNRRYHNFSSSVIVPMALLLVFLLGFATVAEKEMSLSTRATVEPSRILANIQSTSNNRILVNHLEENKLVKKGDLLVQYQEGAEGVQAESYASQLDMLKDQKKQLEYLQKSLQEGENHFPEEDKFGYQATFRDYISQAGSLRASTSQQNETIASQNAAASQTQAEIGNLISQTEAKIRDYQTAKSAIETGASLAGQNLAYSLYQSYKSQGEENPQTKVQAVAQVEAQISQLESSLATYRVQYAGSGTQQAYASGLSSQLESLKSQHLAKVGQELTLLAQKILEAESGKKVQGNLLDKGKVTASEDGVLHLNPETSDSSMVAEGALLAQLYPSLEREGKAKLTAYLSSKYVARIKVGDSVRYTTTHDAGNQLFLDSTITSIDATATKTEKGNFFKIEAETNLTSEQAEKLRYGVEGRLQMITGKKSYLRYYLDQFLNKE

SEQ ID NO: 4797 - DNA, 747 bp, Streptococcus pneumoniae
gtggtaaaatgtgctcaagtaatacgaaaggcgaactttaaaatgtcaaaacaattgatctattcgggaaaagctaaagatatctatacaactgaggatgaaaatcttattatttcaacttacaaggaccaggcgactgctttcaacggtgtcaagaaggagcagattgcaggtaagggagtcttgaataatcagatctcatcttttatttttgagaaattaaatgtggctggtgtggcgactcactttgtggagaaactttcagacacggaacaactcaataaaaaggttaagattattcctttggaagtcgtgctccgcaactatactgctggttccttttcaaaacgttttggtgtggatgagggaatcgccttggagactccgattgtcgaattttactacaaaaatgatgatttggatgatccatttatcaatgatgagcatgtgaaattcctacagattgcgggtgaccagcagattgcctacttgaaggaagaaacgcgtcgtatcaatgaactattgaaagtctggtttgctgagattgggcttaaattgattgactttaagctagagttcggttttgacaaggatggcaagattatcttggcagacgaattttcaccagataactgccgcttgtgggacgctgatggcaaccacatggataaggatgttttccgtagaggattgggagaactaaccgacgtttatgagattgtttgggaaaagttgcaggaattgaaa

SEQ ID NO: 4798 - protein, 249 aa, Streptococcus pneumoniae
  phosphoribosylaminoimidazole-succinocarboxamide synthase (purC); Cellular location: cytoplasm; Similar to strain R6 sequence 15902089 (e-133)
MVKCAQVIRKANFKMSKQLIYSGKAKDIYTTEDENLIISTYKDQATAFNGVKKEQIAGKGVLNNQISSFIFEKLNVAGVATHFVEKLSDTEQLNKKVKIIPLEVVLRNYTAGSFSKRFGVDEGIALETPIVEFYYKNDDLDDPFINDEHVKFLQIAGDQQIAYLKEETRRINELLKVWFAEIGLKLIDFKLEFGFDKDGKIILADEFSPDNCRLWDADGNHMDKDVFRRGLGELTDVYEIVWEKLQELK

SEQ ID NO: 4799 - DNA, 3726 bp, Streptococcus pneumoniae
ttgatggataaacgtatttttgttgaaaaaaaggctgattttcaggtcaagtcagagagtttggttagagagctccagcacaacttgggactgtcaagcttgaaaagtattcgtattgtgcaagtatatgatgtatttgacttggctgaggacttgtttgcacctgcagagaagcacattttctctgagcaggtaaccgaccatgttttagatgaagtatctgtgcaggcggatcttgctaactatgctttctttgccattgaaagtctgccagggcagtttgaccagcgtgcagcttcgtcacaggaagccttgcttttgttgggaagttcgagtgacgtgacagtcaacacagcccaactttacttggtgaataaagatattgatgcgactgagttggaagctgtcaaaaactacctgctcaatccagttgattctcgtttcaaggatatcacgacagggattgccaagcaggagttttcagagtcagacaagaccattcccaaattgactttctttgaaagctatgcagcagaagactttgctcgctacaaggccgaacaagggatggccatggaagtggatgatttgctctttatccaagactactttaagtcaatcgggcgcgtgccaactgagactgaactcaaggttttggacacttactggtctgaccactgccgtcatacgacttttgagacagagttgaaacacatcgacttttcagcttctaaatttcaaaagcaattgcagtcaacctatgacaagtatattgccatgcgcgaggaattaggtcggtctgaaaaaccacaaaccttgatggatatggcgactattttcggtcgttatgagcgtgctaatggacgattggatgatatggaagtctctgacgaaatcaatgcctgctcagttgaaattgaagtggacgttgatggtgtcaaggaaccttggctcctcatgtttaaaaacgaaacccacaaccatccaacagaaattgagccatttggtggagcggctacctgtattggtggagctattcgtgatccgttgtcaggccgttcctatgtttaccaagccatgcgtatttcaggtgctggtgatattacagcaccgatttcggaaactcgcgctgggaaattgccacaacaagtcatttctaaaacagcagctcatggttattcttcatatggtaaccagattgggcttgcaacaacctacgttcgtgaatacttccacccaggctttgtagctaaacgtatggaacttggtgccgttgttggtgcgactcccaagggcaatgttgtccgtgaaaaacctgaagcaggtgatgtgatcatccttctcggaggcaaaacaggtcgtgatggtgtcggtggtgcgacgggctcttctaaggttcaaacagttgagtctgtagagactgctggtgctgaggttcaaaaaggaaatgccatcgaagaacgcaagattcagcgcctcttccgtaatggcaatgtcactcgtctgatcaagaagtccaatgactttggggcaggcggtgtctgtgtggctatcggtgaattggcagacggtcttgaaatcgacctcaacaaggtgcctcttaaataccagggcttgaatggtacagaaattgccatctctgaatcacaagaacggatggcggtcgtggttcgtcctgaagatgtggatgccttcgttgccgaatgtaacaaagaaaatattgatgctgttgtggtggcgacagtaactgaaaaaccaaatcttgtcatgcactggaatggtgagacaatcgttgacttggagcgtcgtttccttgacaccaatggtgtgcgcgtggttgtcgatgccaaagttgtggacaaggatgtcaaactcccagaagagcgtcaaacatctgctgaaacactggaatcagatacccttacggttctatctgacctcaaccatgcaagtcaaaaaggattacagactatctttgactgctctgttggacgctcaacggttaatcacccacttggtggtcgttaccaactcacaccaactgaggcatctgtgcagaaattgccagttcaacacggtgtgactcatactgcgtcggtcattgctcaaggtttcaacccatatgtagctgaatggtctccataccacggtgctgcttatgcggttatcgaagcaactgctcgtttggtggctgctggtgccaactggttcaaggctcgtttctcttaccaagagtatttcgagcgtatggataaacaagcagagcgtttcggtcagccagtagctgctcttctaggttctattgaagcacaaattcagcttggcttgccatctatcggtggtaaggactccatgtctggtacctttgaagaattgaccgttccgccaaccttggctgcctttggggtgacgacggcagatagccgtaaggtgctctctccagaatttaaagctgttggggaaaatatctactacatcccaggtcaagccctctctgcagagattgattttgacttgattaagaaaaattttgctcagtttgaagccatccaagctgaccataaagtgacatctgcatcagctgtcaaatacggtggtgtagttgaaagtttggctcttgctacctttggaaactatattggtgcagaggtgaccttgcctgaacttgaaacagctttgacagctcaattaggcggctttgtcttcacatctcctgaagaaattgctggagtagagaaggttggacaaacgaaagcagactttacactgactgtcaacggtgtgaagctagatggacacaagcttgacagtgcatttcaagggacattggaagaagtttacccaacagaatttacccaagcgaaagaactagaagaagtaccagctgtggcatcagatgttgtgattaaagccaaagaaaaggttgaaaaacctgtggtttacatcccagtctttccaggaaccaactcagaatatgattcagctaaggccttcgaaaaagaaggtgcagaggtcaatttggtgccattcgtgaccttgaatgaagaagctattgtcaagtcagttgaaactatggttgacaatatcgacaagactaatattctcttctttgctggtggattctcggctgcggatgaaccagatggttcagctaagtttatcgtcaatatcctgcttaatgaaaaagtgcgtgtggctattgatagctttatcgcccgtggtggtttgattatcggtatttgtaatggattccaagccttagtcaaatcgggtctcctaccctacggaaactttgaagctgctaacagtactagcccaaccctcttctacaatgatgccaaccaacacgtggccaagatggtggaaactcgcattgccaataccaactcaccatggttggttggtgtgcaagtgggcgatatccacgctattcctgtttcgcacggtgaagggaagtttgtcgtgacggctgaggaatttgcagagctccgtgacaatggacaaattttcagccaatacgttgactttaacggtaaaccaagtatggattctaagtacaatccgaatggttctgtccatgccatcgaaggaattaccagcaagaatggtcaaatcatcggtaagatgggccactcagaacgttatgaggatggtcttttccaaaatatcccaggcaataaagaccaacacctgttcgcatcagcggttaaacatttcactggaaaa

SEQ ID NO: 4800 - protein, 1242 aa, Streptococcus pneumoniae
  phosphoribosylformylglycinamidine synthase, putative; Cellular location: membrane; Similar to strain R6 sequence 15902090 (0.E+01)
MMDKRIFVEKKADFQVKSESLVRELQHNLGLSSLKSIRIVQVYDVFDLAEDLFAPAEKHIFSEQVTDHVLDEVSVQADLANYAFFAIESLPGQFDQRAASSQEALLLLGSSSDVTVNTAQLYLVNKDIDATELEAVKNYLLNPVDSRFKDITTGIAKQEFSESDKTIPKLTFFESYAAEDFARYKAEQGMAMEVDDLLFIQDYFKSIGRVPTETELKVLDTYWSDHCRHTTFETELKHIDFSASKFQKQLQSTYDKYIAMREELGRSEKPQTLMDMATIFGRYERANGRLDDMEVSDEINACSVEIEVDVDGVKEPWLLMFKNETHNHPTEIEPFGGAATCIGGAIRDPLSGRSYVYQAMRISGAGDITAPISETRAGKLPQQVISKTAAHGYSSYGNQIGLATTYVREYFHPGFVAKRMELGAVVGATPKGNVVREKPEAGDVIILLGGKTGRDGVGGATGSSKVQTVESVETAGAEVQKGNAIEERKIQRLFRNGNVTRLIKKSNDFGAGGVCVAIGELADGLEIDLNKVPLKYQGLNGTEIAISESQERMAVVVRPEDVDAFVAECNKENIDAVVVATVTEKPNLVMHWNGETIVDLERRFLDTNGVRVVVDAKVVDKDVKLPEERQTSAETLESDTLTVLSDLNHASQKGLQTIFDCSVGRSTVNHPLGGRYQLTPTEASVQKLPVQHGVTHTASVIAQGFNPYVAEWSPYHGAAYAVIEATARLVAAGANWFKARFSYQEYFERMDKQAERFGQPVAALLGSIEAQIQLGLPSIGGKDSMSGTFEELTVPPTLAAFGVTTADSRKVLSPEFKAVGENIYYIPGQALSAEIDFDLIKKNFAQFEAIQADHKVTSASAVKYGGVVESLALATFGNYIGAEVTLPELETALTAQLGGFVFTSPEEIAGVEKVGQTKADFTLTVNGVKLDGHKLDSAFQGTLEEVYPTEFTQAKELEEVPAVASDVVIKAKEKVEKPVVYIPVFPGTNSEYDSAKAFEKEGAEVNLVPFVTLNEEAIVKSVETMVDNIDKTNILFFAGGFSAADEPDGSAKFIVNILLNEKVRVAIDSFIARGGLIIGICNGFQALVKSGLLPYGNFEAANSTSPTLFYNDANQHVAKMVETRIANTNSPWLVGVQVGDIHAIPVSHGEGKFVVTAEEFAELRDNGQIFSQYVDFNGKPSMDSKYNPNGSVHAIEGITSKNGQIIGKMGHSERYEDGLFQNIPGNKDQHLFASAVKHFTGK

SEQ ID NO: 4801 - DNA, 1440 bp, Streptococcus pneumoniae
atgacatacgaagtaaaatctcttaatgaagaatgtggtgttttcggtatttggggacatccagatgctgctaagttgacctattttggactccacagtcttcaacaccgtggtcaggagggggcaggaatcctctccaatgatcaaggacaactgaagcgccatcgtgacatggggcttttatcagaagttttcagaaatccagctaatttggataaattgacaggagctggtgcgattgggcatgtgcgttatgcgactgctggcgaagcttctgtagataacatccagcccttcctcttccgttttcacgatatgcagtttggtttggctcataatggaaatctgaccaatgcagcctctctcaagaaagaactggaacaaagaggagcaattttcagcgcgacttcggactctgaaatcttggctcacctcattcgtcgcagtcataatcctagcctgatgggcaaaatcaaggaagcgctcagccttgtcaaaggtggttttgcctatatcttgctgtttgaggacaagttgattgcggctcttgacccaaatggattccgaccgctttcgattggtaaaatggctaatggagcagttgttgtatcttctgaaacctgtgcttttgaggtcattggtgccgagtggattcgtgatttgaagccaggtgagattgtgatcattgatgacgagggcattcagtatgacagctatacagatgatacccagttggcggtttgttctatggagtatatctactttgctcgccctgattctaatatccacggtgtcaatgtccatacggcacgtaagagaatgggagcgcaattggcgcgagaatttaagcatgaggcagatattgtagttggtgtgcccaattcttccctaagcgcggctatgggatttgcggaagaatcaggcttaccaaatgaaatgggtctgatcaaaaaccaatacacccagcgaacttttatccaaccgactcaagaattgcgggagcaaggagtgcggatgaaactgtctgctgtttcgggtgttgtcaaaggcaaacgtgtggtcatggtggatgattccattgtacgtggaacaacctctcgtcgtatcgttcagctcttgaaagaagcgggtgcgactgaggttcacgttgccattggaagtcctgcactagcgtatccatgtttctacgggattgatatccagacccgtcaggagctgattgcagccaatcatacggtcgaagaaactcgccaaatcattggtgcggacagtctgacttatctttcaattgatggcttgattgagtcgattggtatcgaaacagatgcgccgaacggtggtctctgtgtcgcttactttgacggtgactacccaacgcctctttatgactacgaagaagactatcgtagaagtttggaagaaaagaccagtttttacaag

SEQ ID NO: 4802 - protein, 480 aa, Streptococcus pneumoniae
  amidophosphoribosyltransferase (purF); Cellular location: cytoplasm; Similar to strain R6 sequence 15902091 (0.E+01)
MTYEVKSLNEECGVFGIWGHPDAAKLTYFGLHSLQHRGQEGAGILSNDQGQLKRHRDMGLLSEVFRNPANLDKLTGAGAIGHVRYATAGEASVDNIQPFLFRFHDMQFGLAHNGNLTNAASLKKELEQRGAIFSATSDSEILAHLIRRSHNPSLMGKIKEALSLVKGGFAYILLFEDKLIAALDPNGFRPLSIGKMANGAVVVSSETCAFEVIGAEWIRDLKPGEIVIIDDEGIQYDSYTDDTQLAVCSMEYIYFARPDSNIHGVNVHTARKRMGAQLAREFKHEADIVVGVPNSSLSAAMGFAEESGLPNEMGLIKNQYTQRTFIQPTQELREQGVRMKLSAVSGVVKGKRVVMVDDSIVRGTTSRRIVQLLKEAGATEVHVAIGSPALAYPCFYGIDIQTRQELIAANHTVEETRQIIGADSLTYLSIDGLIESIGIETDAPNGGLCVAYFDGDYPTPLYDYEEDYRRSLEEKTSFYK

SEQ ID NO: 4803 - DNA, 1077 bp, Streptococcus pneumoniae
atggtttatctaaaaatacgtcgcagtctttctcaaaaaaagaaaaggaaaaataaaatggcaaataaaaatgcgtacgctcaatctggtgtggatgttgaagcgggttatgaagttgttgaacggattaaaaagcacgtggcccgtacggagcgtgcaggtgtcatgggagctcttggtggctttggtggtatgtttgacctttccaagactggggttaaagaacccgtcttgatttcagggactgacggtgtcggaaccaagctcatgttggctatcaagtacgacaagcacgataccatcgggcaggactgtgtggccatgtgtgtcaacgacatcattgctgcaggtgcggaacccctctattttctcgactacgtagcgacagggaagaatgaaccagctaagctagaacaagtggttgctggtgtggcagaaggttgtgtgcaggctggtgctgccctcatcggtggggaaacggctgaaatgccgggcatgtacggcgaagacgactatgacttggctggttttgcggtcggtgtggctgaaaaatctcaaatcattgacggttcaaaggtggtagagggagatgttcttctcggacttgcttcaagtgggattcactcaaatggttactctttggttcgtcgtgtctttgcggattacacaggtgaggaagtcctaccagaattggaaggcaagaaacttaaggaagttctacttgagccgactcgtatctatgtcaaggctgtcttgccgctcatcaaagaagagttggtcaacggcattgcccacatcacaggtggtggctttatcgaaaatgtccctcgtatgtttgcagatgacctagctgctgaaattgatgaaagtaaagttccagtgcttccaattttcaaaacccttgaaaaatacggtcagattaaacacgaagaaatgtttgaaatcttcaatatgggtgtgggacttatgttggcggtcagccctgaaaatgtagagcgtgtaaaagaattgttggatgaagcagtctatgaaattggtcgcatcgtcaagaaagaaaacgaaagtgtcattatcaaa

SEQ ID NO: 4804 - protein, 359 aa, Streptococcus pneumoniae
  phosphoribosylformylglycinamide cyclo-ligase (purM); Cellular location: membrane; Similar to strain R6 sequence 15902092 (0.E+01)
MVYLKIRRSLSQKKKRKNKMANKNAYAQSGVDVEAGYEVVERIKKHVARTERAGVMGALGGFGGMFDLSKTGVKEPVLISGTDGVGTKLMLAIKYDKHDTIGQDCVAMCVNDIIAAGAEPLYFLDYVATGKNEPAKLEQVVAGVAEGCVQAGAALIGGETAEMPGMYGEDDYDLAGFAVGVAEKSQIIDGSKVVEGDVLLGLASSGIHSNGYSLVRRVFADYTGEEVLPELEGKKLKEVLLEPTRIYVKAVLPLIKEELVNGIAHITGGGFIENVPRMFADDLAAEIDESKVPVLPIFKTLEKYGQIKHEEMFEIFNMGVGLMLAVSPENVERVKELLDEAVYEIGRIVKKENESVIIK

SEQ ID NO: 4805 - DNA, 543 bp, Streptococcus pneumoniae
atgaaaaaaatagcggtttttgcctctggtaatggctcaaattttcaggtgattgccgaagaatttccagtggagtttgtcttttcagaccatcgtgatgcctatgtgcttgagcgtgcaaagcagctcggcgttctgtcctatgcttttgaactcaaggagtttgagagcaaggcagactacgaagcagcccttgtcgaactcttggaagaacaccagattgacttggtttgcctagcaggctacatgaaaatcgttggaccaaccttattgtcggcttatgaaggtcggattgtcaacattcatccagcctacttgccagaatttccaggagctcatgggattgaggatgcttggaatgctggcgtgggtcagtctggtgtgaccattcactgggtggattcgggtgtggatacaggccaggtcatcaaacaggttcgtgtgccacgactagctgatgataccattgacagatttgaagctcgcatccatgaagcagagtacaggctgtatccggaagtagtgaaggctctatttacagat

SEQ ID NO: 4806 - protein, 181 aa, Streptococcus pneumoniae
  phosphoribosylglycinamide formyltransferase (purN); Cellular location: cytoplasm; Similar to strain R6 sequence 15902093 (e-102)
MKKIAVFASGNGSNFQVIAEEFPVEFVFSDHRDAYVLERAKQLGVLSYAFELKEFESKADYEAALVELLEEHQIDLVCLAGYMKIVGPTLLSAYEGRIVNIHPAYLPEFPGAHGIEDAWNAGVGQSGVTIHWVDSGVDTGQVIKQVRVPRLADDTIDRFEARIHEAEYRLYPEVVKALFTD

SEQ ID NO: 4807 - DNA, 507 bp, Streptococcus pneumoniae
atgttagaatctaaaaaaacaactcgatatgtattttatgtctatctgatgttattaacttggggaatcttatttaagtttgaaacaaatcctgaatttatagcatttttcttagctccaaggtatatcaattggattccattttcagaaccactaatagtcgatggaaaaattgtttttgctgaaatgttatttaatctgattttctttattccattaggtgtttgtttccctttgataaaaactaatttatctagtttaagaatagtcgggacaggtttcttgattagtttattgtttgagtgcttacagtatattttagcaataggtataacagatataacggatttgactttaaatacgctaggtgtctgtgtaggcttactgatttatcaaatttttataagagtgttcaaatcacagactagaaaatggatcaatatcttaggtatgcttagccttggttttgcttatcttgttttactgttactgcatttacttagtgtt

SEQ ID NO: 4808 - protein, 169 aa, Streptococcus pneumoniae
  vanZ protein, putative; Cellular location: membrane; Similar to strain R6 sequence 15902094 (1.E-92)
MLESKKTTRYVFYVYLMLLTWGILFKFETNPEFIAFFLAPRYINWIPFSEPLIVDGKIVFAEMLFNLIFFIPLGVCFPLIKTNLSSLRIVGTGFLISLLFECLQYILAIGITDITDLTLNTLGVCVGLLIYQIFIRVFKSQTRKWINILGMLSLGFAYLVLLLLHLLSV

SEQ ID NO: 4809 - DNA, 1545 bp, Streptococcus pneumoniae
atgactaaacgcgtcttaatcagcgtctcagacaaagcgggcattgttgaatttgcccaagaactcaaaaaacttggttgggagattatctcaacaggtggaactaaggttgcccttgataatgctggggtggataccattgctatcgatgatgtgactggtttcccagaaatgatggacggtcgtgtgaagaccctccacccaaatatccacggagggcttctcgctcgtcgtgacttggatagccacttggaagcggctaaggacaacaagattgagctcattgaccttgtggtggtcaacctttacccatttaaggaaactatccttaaaccagatgtgacttatgctgatgcagttgaaaatatcgatattggtgggccatctatgcttcgttcagcagcgaaaaatcatgccagtgttacagttgtggtagatcctgctgactacgctgtggttttggatgaattggcagcaaacggcgaaacctcttatgaaactcgccaacgtttagcagccaaagtatttcgtcacacagcggcttatgacgccttgattgcagaatacttcacagctcaagtgggtgaaagcaagcctgaaaaactcactttgacttatgacctcaagcaaccaatgcgttacggtgagaatcctcaacaagacgcggacttttaccagaaagctttgcctacagactactccattgcttcagccaaacagctcaacgggaaagaattgtcatttaataatatccgtgatgcagatgctgctatccgtatcatccgtgacttcaaagatagtccaaccgttgtggctctcaaacacatgaatccatgtggaattggtcaagctgatgacatcgagactgcttgggactacgcttatgagtctgacccagtgtctatctttggtgggattgtcgtcctcaaccgtgaggtggatgctgcgacagctgagaagatgcacggcgttttcctcgaaatcatcattgcaccaagctatacggatgaagcgctagccattttgatcaataaaaagaaaaacttgcgtatccttgccttgccatttaatgctcaagaggctagcgaagtggaagcagaatacacaggtgtagtcggtggacttctcgtgcaaaatcaagacgtggtcaaggaaagcccagctgactggcaagtggtgactaaacgtcagccaactgagacagaagcgactgctcttgagttcgcttggaaggctatcaagtacgtcaaatcaaatggtattatcgtgaccaacgaccacatgacacttggtgttggtccaggtcaaaccaaccgtgtggcttctgttcgccttgccattgaccaagccaaagatcgtctggacggggcggtccttgcttcagatgccttcttcccatttgcggataacgtggaagaaatcgccaaagcaggaattaaggccatcatccagcccggtggctctgtccgtgaccaagaatccatcgaagcagcggataaatacggcttgactatggtctttacaggtgtgagacattttagacat

SEQ ID NO: 4810 - protein, 515 aa, Streptococcus pneumoniae
  phosphoribosylaminoimidazolecarboxamide formyltransferase/IMP cyclohydr; Cellular location: cytoplasm; Similar to strain R6 sequence 15902095 (0.E+01)
MTKRVLISVSDKAGIVEFAQELKKLGWEIISTGGTKVALDNAGVDTIAIDDVTGFPEMMDGRVKTLHPNIHGGLLARRDLDSHLEAAKDNKIELIDLVVVNLYPFKETILKPDVTYADAVENIDIGGPSMLRSAAKNHASVTVVVDPADYAVVLDELAANGETSYETRQRLAAKVFRHTAAYDALIAEYFTAQVGESKPEKLTLTYDLKQPMRYGENPQQDADFYQKALPTDYSIASAKQLNGKELSFNNIRDADAAIRIIRDFKDSPTVVALKHMNPCGIGQADDIETAWDYAYESDPVSIFGGIVVLNREVDAATAEKMHGVFLEIIIAPSYTDEALAILINKKKNLRILALPFNAQEASEVEAEYTGVVGGLLVQNQDVVKESPADWQVVTKRQPTETEATALEFAWKAIKYVKSNGIIVTNDHMTLGVGPGQTNRVASVRLAIDQAKDRLDGAVLASDAFFPFADNVEEIAKAGIKAIIQPGGSVRDQESIEAADKYGLTMVFTGVRHFRH

SEQ ID NO: 4811 - DNA, 1260 bp, Streptococcus pneumoniae
atgaaactgcttgttgtcggttctggtggtcgtgagcatgcgattgctaaaaagttacttgaatcaaaagacgtggaaaaagtctttgtagctcctgggaatgatgggatgactctggatggtttggaattggtaaatatctctatttccgaacattataaattgattgacttcgcaaagaccaatgatgttgcttggacctttatcggtccagatgatgcccttgctgctggtatcgtggatgattttaaccaagctggacttaaggcctttggtccgactagggctgcagcggagctggagtggtccaaggatttcgccaaggaaatcatggtcaaatacggcgttccgacagcaacatatggcacattttcagatttcgaggaagccaaagcctatatcgaaaagcatggtgcgcctatcgtagtcaaggcggatggcttggcacttgggaagggtgtcgtcgttgctgagacggttgagcaagcggtcgaagccgctcatgagatgcttttggacaataaatttggtgactcaggtgcgcgcgtggttattgaggaattccttgaaggagaggaattttcactctttgcctttgtcaatggtgataagttctacatcatgccaacggctcaggaccacaaacgtgcctatgatggcgacaaagggcctaacacgggtggtatgggtgcctatgcgccagtcccacacttaccacagagtgtagttgatacagcggttgacaccattgtcaagccagttctagaaggggtgattaaagaaggtcgcccttatctgggagttctttacgcagggcttatcctgacagctgatggaccgaaagtcattgagttcaacgctcggttcggagatccagaaactcagattatcttgcctcgcttgacctctgactttgctcaaaatatcacagatatcctggatagcaaggagccaaatatcatgtggacggacaagggtgtgactctgggtgtggttgtcgcatccaagggctacccgctagactatgaaaggggcgttgagttgccagccaagacagaaggcgatgtcatcacctactatgcaggggctaagtttgcggaaaatagcagagcactgctctcaaacggcggacgagtttatatgctcgttaccacagcagataccgtcaaagaagcccaagccagcatataccaagaactataccaacaaaaaatagaaggactcttctaccgaacagatatcggaagcaaggcaattaag

SEQ ID NO: 4812 - protein, 420 aa, Streptococcus pneumoniae
  phosphoribosylamine--glycine ligase (purD); Cellular location: cytoplasm; Similar to strain R6 sequence 15902096 (0.E+01)
MKLLVVGSGGREHAIAKKLLESKDVEKVFVAPGNDGMTLDGLELVNISISEHYKLIDFAKTNDVAWTFIGPDDALAAGIVDDFNQAGLKAFGPTRAAAELEWSKDFAKEIMVKYGVPTATYGTFSDFEEAKAYIEKHGAPIVVKADGLALGKGVVVAETVEQAVEAAHEMLLDNKFGDSGARVVIEEFLEGEEFSLFAFVNGDKFYIMPTAQDHKRAYDGDKGPNTGGMGAYAPVPHLPQSVVDTAVDTIVKPVLEGVIKEGRPYLGVLYAGLILTADGPKVIEFNARFGDPETQIILPRLTSDFAQNITDILDSKEPNIMWTDKGVTLGVVVASKGYPLDYERGVELPAKTEGDVITYYAGAKFAENSRALLSNGGRVYMLVTTADTVKEAQASIYQELYQQKIEGLFYRTDIGSKAIK

SEQ ID NO: 4813 - DNA, 114 bp, Streptococcus pneumoniae
gtgaaagaacgattggatgataatccaatcgttcagggaaattggaagaccttgggtttccaatttaggcatgagacacctttggtggctgctgccgtccctcacaagctaagg

SEQ ID NO: 4814 - protein, 38 aa, Streptococcus pneumoniae
  hypothetical protein; Cellular location: cytoplasm
MKERLDDNPIVQGNWKTLGFQFRHETPLVAAAVPHKLR

SEQ ID NO: 4815 - DNA, 105 bp, Streptococcus pneumoniae
atgatgatggaaattactggtttcatttcttctcctttttcctctttttcaacaatcaccttagcttgtgagggacggcagcagccaccaaaggtgtctcatgcc

SEQ ID NO: 4816 - protein, 35 aa, Streptococcus pneumoniae
  hypothetical protein
MMMEITGFISSPFSSFSTITLACEGRQQPPKVSHA

SEQ ID NO: 4817 - DNA, 486 bp, Streptococcus pneumoniae
atgaaaccagtaatttccatcatcatgggctcaaaatccgactgggcaaccatgcaaaaaacagcagaagtcctagaccgcttcggtgtagcctacgaaaagaaagttgtttccgcacaccgtacaccagacctcatgttcaaacatgcagaagaagcccgtagtcgtggcatcaagatcatcatcgcaggtgctggtggcgcagcgcatttgccaggcatggtagctgccaaaacaacccttccagtcattggtgtgccagtcaagtctcgtgctcttagtggagtggattcactctattctatcgttcagatgccgggtggggtgcctgttgcgaccatggctatcggtgaagctggagcgactaacgcagctctctttgccctccgtctcctctctgtagaagataagtccattgcggatgcacttgccaactttgctgaagaacaaggaaaaatcgcagaggagtcgtcaaatgagctcatc

SEQ ID NO: 4818 - protein, 162 aa, Streptococcus pneumoniae
  phosphoribosylaminoimidazole carboxylase, catalytic subunit (purE); Cellular location: outside; Similar to strain R6 sequence 15902097 (3.E-86)
MKPVISIIMGSKSDWATMQKTAEVLDRFGVAYEKKVVSAHRTPDLMFKHAEEARSRGIKIIIAGAGGAAHLPGMVAAKTTLPVIGVPVKSRALSGVDSLYSIVQMPGGVPVATMAIGEAGATNAALFALRLLSVEDKSIADALANFAEEQGKIAEESSNELI

SEQ ID NO: 4819 - DNA, 1089 bp, Streptococcus pneumoniae
atgagctcatctaaaacaatcggaattatcggtggcggtcaactgggtcagatgatggccatttctgctatctacatgggccacaaggttatcgcgctggatcctgcggcggattgcccggtctctcgtgtggcggaaatcattgtggcaccttataacgatgtagacgccctccgtcagttggcagaccgttgcgatgtcctcacttatgagtttgaaaatgtcgacgctgacggtttggatgccgttatcaaggatggacaactccctcaaggaacagatctgctccgcatttcgcaaaatcgtatttttgaaaaggactttttgtcaaacaaggctcaagtcactgtggcaccctacaaggtcgtgacttctagcctagacttggcagatatcgacttgtcgaaaaactatgtcctcaagactgcgactggtggctacgatggtcatggacaaaaggttattcgttcagaagcagacttggaagcagcctatgcgctagcagactcagcagactgcgtcttggaagaatttgtcaactttgaccttgagatttctgtcatcgtgtcaggaaatggcaaggaggtgacgtttttcccagttcaggaaaatatccaccgcaacaatatcctgtctaagaccatcgtaccagcccgcatttctgaaagtctagtagacaaggctaaagctatggcagtgcgaatcgcagaacaactcaacttgtctggaactctctgtgtggaaatgtttgcgacagctgatgacatcattgtcaatgaaatcgccccacgaccacataactctgggcactattctattgaagcctgtgatttctctcagtttgacacccatattctgggtgttctcggagcaccattaccagtcatcaaactccatgcgccagccgttatgcttaatgtcctcggtcagcatgtcgaggctgctgaaaaatatgtcacagaaaatccaagcgcccacctccacatgtatggtaaaatagaagcaaagcataatcgtaagatgggacatgtgactttgtttagtgatgtgccggatagtgtggaagagtttggggaagggattgatttt

SEQ ID NO: 4820 - protein, 363 aa, Streptococcus pneumoniae
  phosphoribosylaminoimidazole carboxylase, ATPase subunit (purK); Cellular location: cytoplasm; Similar to strain R6 sequence 15902098 (0.E+01)
MSSSKTIGIIGGGQLGQMMAISAIYMGHKVIALDPAADCPVSRVAEIIVAPYNDVDALRQLADRCDVLTYEFENVDADGLDAVIKDGQLPQGTDLLRISQNRIFEKDFLSNKAQVTVAPYKVVTSSLDLADIDLSKNYVLKTATGGYDGHGQKVIRSEADLEAAYALADSADCVLEEFVNFDLEISVIVSGNGKEVTFFPVQENIHRNNILSKTIVPARISESLVDKAKAMAVRIAEQLNLSGTLCVEMFATADDIIVNEIAPRPHNSGHYSIEACDFSQFDTHILGVLGAPLPVIKLHAPAVMLNVLGQHVEAAEKYVTENPSAHLHMYGKIEAKHNRKMGHVTLFSDVPDSVEEFGEGIDF

SEQ ID NO: 4821 - DNA, 225 bp, Streptococcus pneumoniae
atgatacaaattatcgttaatacatttattgaaaagtataagactggagcagttgttgaagtgttgtatgccagtgctgaccaagataaggtacaagctaaatatgaagaactagctgcacaataccccgaaaattatttagctatctataatgtaccgctggatacggatttgaatacactagatcattacccgtctgtgtttattggaaaagaggagtttgag

SEQ ID NO: 4822 - protein, 75 aa, Streptococcus pneumoniae
  hypothetical protein; Cellular location: cytoplasm; Similar to strain R6 sequence 15902099 (1.E-36)
MIQIIVNTFIEKYKTGAVVEVLYASADQDKVQAKYEELAAQYPENYLAIYNVPLDTDLNTLDHYPSVFIGKEEFE

SEQ ID NO: 4823 - DNA, 1296 bp, Streptococcus pneumoniae
atgatcaaccgttactctcgccctgagatggcgaatatttggagtgaagaaaataaataccgtgcttggcttgaggtggaaatcctctctgacgaggcatgggctgagttgggggaaatccctaaggaagatgtggctttgattcgcaagaaggcggactttgacatcgaccgtattttggaaattgagcaggagacgcgccacgatgtggtggctttcacgcgtgcggtttctgagactcttggtgaagagcgcaagtgggttcactatgggttaacttctactgacgtggtggatactgcttatggttacctctacaagcaggccaacgacatcatccgtcgtgaccttgaaaacttcactaatatcatcgctgacaaggccaaggagcacaagttcaccatcatgatggggcgtactcatggtgtgcacgctgagccgacaacctttggtcttaaattagcaacttggtacagcgaaatgaaacgcaatatcgagcgcttcgagcatgcggctgctggtgtagaagctggtaagatttctggtgcggttgggaactttgccaatatcccaccatttgtagaggagtatgtctgcgataaacttggcatccgtgcccaagaaatctctacacaagtccttcctcgtgaccttcacgctgagtactttgcggttcttgccagcattgcgacttcaatcgaacgtatggcgactgagattcgtggtctacaaaaatctgagcaacgcgaagtagaagagttctttgctaaagggcaaaaagggtcttcagcaatgcctcacaaacgcaacccaatcggttctgaaaatatgactggtctggcgcgtgtcattcgtggtcacatgattacggcttatgaaaacgtcgctctctggcatgaacgcgatatttctcactcatcagctgagcgtatcatcacaccagatacgaccattttgattgactacatgctcaaccgttttggaaatatcgtcaagaacttgacagtcttcccagaaaatatgatccgaaacatgaactcgacttttggtcttatctttagccaacgggctatgttgacattgattgaaaaaggcatgacccgtgagcaagcctatgacttggtgcaaccaaaaacagcctactcttgggacaaccaagtagactttaaaccacttcttgaggcagattcagaagtaacatcacgtctcacacaagaagaaatcgatgaaatcttcaacccagtttattacaccaaacgagtggatgatatctttgaacgtcttggactaggtgat

SEQ ID NO: 4824 - protein, 432 aa, Streptococcus pneumoniae
  adenylosuccinate lyase (purB); Cellular location: cytoplasm; Similar to strain R6 sequence 15902100 (0.E+01)
MINRYSRPEMANIWSEENKYRAWLEVEILSDEAWAELGEIPKEDVALIRKKADFDIDRILEIEQETRHDVVAFTRAVSETLGEERKWVHYGLTSTDVVDTAYGYLYKQANDIIRRDLENFTNIIADKAKEHKFTIMMGRTHGVHAEPTTFGLKLATWYSEMKRNIERFEHAAAGVEAGKISGAVGNFANIPPFVEEYVCDKLGIRAQEISTQVLPRDLHAEYFAVLASIATSIERMATEIRGLQKSEQREVEEFFAKGQKGSSAMPHKRNPIGSENMTGLARVIRGHMITAYENVALWHERDISHSSAERIITPDTTILIDYMLNRFGNIVKNLTVFPENMIRNMNSTFGLIFSQRAMLTLIEKGMTREQAYDLVQPKTAYSWDNQVDFKPLLEADSEVTSRLTQEEIDEIFNPVYYTKRVDDIFERLGLGD

SEQ ID NO: 4825 - DNA, 3987 bp, Streptococcus pneumoniae
ttgatttatataatcgctatcaatataacaatgcaatcaggaggttttgcaatgaaacatgaaaaacaacagcgtttttctattcgtaaatacgctgtaggagcagcttctgttctaattggatttgccttccaagcacagactgttgcagccgatggagttactcctactactacagaaaaccaaccgaccatccatacggtttctgattcccctcaatcatccgaaaatcggactgaggaaacacctaaagcagtgcttcaaccagaagctccaaaaactgtagaaacagaaactccagctactgataaggtagctagtcttccaaaaacagaagaaaaaccacaagaggaagttagttcaactcctagtgataaagcagaagtggtaactccaacttctgctgaaaaagaaactgctaataaaaaggcagaagaagctagccctaaaaaggaagaagcgaaagaggttgattctaaagagtcaaatacagacaagactgacaaggataaaccagctaaaaaagatgaagcgaaagcagaggctgacaaaccggcaacagaggcaggaaaggaacgtgctgcaactgtaaatgaaaaactagcgaaaaagaaaattgtttctattgatgctggacgtaaatatttctcaccagaacagctcaaggaaatcatcgataaagcgaaacattatggctacactgatttacacctattagtcggaaatgatggactccgtttcatgttggacgatatgagcatcacagctaacggcaagacctatgccagtgacgatgtcaaacgcgccattgaaaaaggtacaaatgattattacaacgatccaaacggcaatcacttaacagaaagtcaaatgacagatctgattaactatgccaaagataaaggtatcggtctcattccgacagtaaatagtcctggacacatggatgcgattctcaatgccatgaaagaattgggaatccaaaaccctaactttagctattttgggaagaaatcagcccgtactgtcgatcttgacaacgaacaagctgtcgcttttacaaaagcccttatcgacaagtatgctgcttatttcgcgaaaaagactgaaatcttcaacatcggacttgatgaatatgccaatgatgcgacagatgctaaaggttggagtgtgcttcaagctgataaatactatccaaacgaaggctaccctgtaaaaggctatgaaaaatttattgcctacgccaatgacctcgctcgtattgtaaaatcgcacggtctcaaaccaatggcttttaacgacggtatctactacaatagcgacacaagctttggtagttttgacaaagacatcatcgtttctatgtggactggtggttggggaggctacgatgtcgcttcttctaaactactagctgaaaaaggtcaccaaatccttaataccaatgatgcttggtactacgttcttggacgaaacgctgatggccaaggctggtacaatctcgatcaggggctcaatggtattaaaaacacaccaatcacttctgtaccaaaaacagaaggagctgatatcccaatcatcggtggtatggtagctgcttgggctgacactccatctgcacgttattcaccatcacgcctcttcaaactcatgcgtcattttgcaaatgccaacgctgaatacttcgcagctgattatgaatctgcagagcaagcacttaacgaggtaccaaaagacctgaaccgttatactgcagaaagcgtcacggccgtaaaagaagctgaaaaagctattcgctctctcgatagcaaccttagccgtgcccaacaagatacgattgatcaagccattgctaaacttcaagaaactgtcaacaacttgaccctcacgcctgaagctcaaaaagaagaagaagctaaacgtgaggttgaaaaacttgccaaaaacaaggtaatctcaatcgatgctggacgcaaatactttactctgaaccagctcaaacgcatcgtagacaaggccagtgagctcggatattctgatgtccatctccttctaggaaatgacggacttcgctttctactcgatgatatgaccattactgccaacggaaaaacctatgctagtgatgacgttaaaaaagctattatcgaaggaactaaagcttactacgacgatccaaacggtactgcactaacacaggcagaagtaacagagctaattgaatacgctaaatctaaggacatcggtctcatcccagctattaacagtccaggtcacatggatgctatgctggttgccatggaaaaattaggtattaaaaatcctcaagcccactttgataaagtttcaaaaacaactatggacttgaaaaacgaagaagcgatgaactttgtaaaagccctcatcggtaaatacatggacttctttgcaggtaaaacaaagattttcaactttggtactgacgaatacgccaacgatgcgactagtgcccaaggctggtactacctcaagtggtatcaactctatggcaaatttgccgaatatgccaacaccctcgcagctatggccaaagaaagagggcttcaaccaatggccttcaacgatggcttctactatgaagacaaggacgatgttcagtttgacaaagatgtcttgatttcttactggtctaaaggctggtggggatataacctcgcatcacctcaatacctagcaagcaaaggctataaattcttgaataccaacggtgactggtactacattcttggtcaaaaaccagaagatggtggtggtttcctcaagaaagctattgagaatactggaaaaacaccattcaatcaactagcttctaccaaatatcctgaagtagatcttccaacagtcggaagtatgctttcaatctgggcagatagaccaagcgctgaatacaaggaagaggaaatctttgaactcatgactgcctttgcagaccacaacaaagactactttcgtgctaattataatgctctccgcgaagaattagctaaaattcctacaaacttagaaggatatagtaaagaaagtcttgaggcccttgacgcagctaaaacagctctaaattacaacctcaaccgtaataaacaagctgagcttgacacgcttgtagccaacctaaaagccgctcttcaaggcctcaaaccagctgtaactcattcaggaagcctagatgaaaatgaagtggctgccaatgttgaaaccagaccagaactcatcacaagaactgaagaaattccatttgaagttatcaagaaagaaaatcctaacctcccagccggtcaggaaaatattatcacagcaggagtcaaaggtgaacgaactcattacatctctgtactcactgaaaatggaaaaacaacagaaacagtccttgatagccaggtaaccaaagaagttataaaccaagtggttgaagttggcgctcctgtaactcacaagggtgatgaaagtggtcttgcaccaactactgaggtaaaacctagactggatatccaagaagaagaaattccatttaccacagtgacttgtgaaaatccactcttactcaaaggaaaaacacaagtcattactaagggcgtcaatggacatcgtagcaacttctactctgtgagcacttctgccgatggtaaggaagtgaaaacacttgtaaatagtgtcgtagcacaggaagccgttactcaaatagtcgaagtcggaactatggtaacacatgtaggcgatgaaaacggacaagccgctattgctgaagaaaaaccaaaactagaaatcccaagccaaccagctccatcaactgctcctgctgaggaaagcaaagttcttcctcaagatccagctcctgtggtaacagagaaaaaacttcctgaaacaggaactcacgattctgcaggactagtagtcgcaggactcatgtccacactagcagcctatggactcactaaaagaaaagaagac

SEQ ID NO: 4826 - protein, 1329 aa, Streptococcus pneumoniae
  beta-N-acetylhexosaminidase (strH); Cellular location: Peptidoglycan-bound (LPXTG); Feature of note: WYY motif; Similar to strain R6 sequence 15902101 (0.E+01)
MIYIIAINITMQSGGFAMKHEKQQRFSIRKYAVGAASVLIGFAFQAQTVAADGVTPTTTENQPTIHTVSDSPQSSENRTEETPKAVLQPEAPKTVETETPATDKVASLPKTEEKPQEEVSSTPSDKAEVVTPTSAEKETANKKAEEASPKKEEAKEVDSKESNTDKTDKDKPAKKDEAKAEADKPATEAGKERAATVNEKLAKKKIVSIDAGRKYFSPEQLKEIIDKAKHYGYTDLHLLVGNDGLRFMLDDMSITANGKTYASDDVKRAIEKGTNDYYNDPNGNHLTESQMTDLINYAKDKGIGLIPTVNSPGHMDAILNAMKELGIQNPNFSYFGKKSARTVDLDNEQAVAFTKALIDKYAAYFAKKTEIFNIGLDEYANDATDAKGWSVLQADKYYPNEGYPVKGYEKFIAYANDLARIVKSHGLKPMAFNDGIYYNSDTSFGSFDKDIIVSMWTGGWGGYDVASSKLLAEKGHQILNTNDAWYYVLGRNADGQGWYNLDQGLNGIKNTPITSVPKTEGADIPIIGGMVAAWADTPSARYSPSRLFKLMRHFANANAEYFAADYESAEQALNEVPKDLNRYTAESVTAVKEAEKAIRSLDSNLSRAQQDTIDQAIAKLQETVNNLTLTPEAQKEEEAKREVEKLAKNKVISIDAGRKYFTLNQLKRIVDKASELGYSDVHLLLGNDGLRFLLDDMTITANGKTYASDDVKKAIIEGTKAYYDDPNGTALTQAEVTELIEYAKSKDIGLIPAINSPGHMDAMLVAMEKLGIKNPQAHFDKVSKTTMDLKNEEAMNFVKALIGKYMDFFAGKTKIFNFGTDEYANDATSAQGWYYLKWYQLYGKFAEYANTLAAMAKERGLQPMAFNDGFYYEDKDDVQFDKDVLISYWSKGWWGYNLASPQYLASKGYKFLNTNGDWYYILGQKPEDGGGFLKKAIENTGKTPFNQLASTKYPEVDLPTVGSMLSIWADRPSAEYKEEEIFELMTAFADHNKDYFRANYNALREELAKIPTNLEGYSKESLEALDAAKTALNYNLNRNKQAELDTLVANLKAALQGLKPAVTHSGSLDENEVAANVETRPELITRTEEIPFEVIKKENPNLPAGQENIITAGVKGERTHYISVLTENGKTTETVLDSQVTKEVINQVVEVGAPVTHKGDESGLAPTTEVKPRLDIQEEEIPFTTVTCENPLLLKGKTQVITKGVNGHRSNFYSVSTSADGKEVKTLVNSVVAQEAVTQIVEVGTMVTHVGDENGQAAIAEEKPKLEIPSQPAPSTAPAEESKVLPQDPAPVVTEKKLPETGTHDSAGLVVAGLMSTLAAYGLTKRKED

SEQ ID NO: 4827 - DNA, 714 bp, Streptococcus pneumoniae
atggcaattcccaaatatcaatacataaaagacgaattaaaaaataaaatcatctctgggcagtttagcagtggagataaattttacactgaagcagaactcatttcaatgtacgatgtcagctctatcacagttgttcgcgccttaaacgaccttgccaaagatggctatattgtccgccaacaaggaaaaggaaccttcgtttcacgtgcacgcaaacacaagcttgtagagttttcagatattgaactcttcaatgctaaagatgataaggtaactgttctttcaattgaacgcggaaacaagcttgtttacttggaaaaattgggtctacgcggcgatcaattctactacaagattgaacgtatccgcgaatcaaacggtgtcgtttatatctaccatacatcctacatcccagaacaatatatcaacgcaaattatccaaaccttgaatactatagttctatctataatcgtttcaagttagactaccacattcacatgaatgatgaacactttgaagaaatcaacgaaatagtctttccaactccagaacatgcagcttcagtcctcggagtcgatgaacaattccctactgtcctacaaactaaaatcaccaaactcgaatcaactggccaagttttagaatacagtgaaacttacaaacgatctgattactacaagattaaatttatctcatgtgaccgtgatcac

SEQ ID NO: 4828 - protein, 238 aa, Streptococcus pneumoniae
  transcriptional regulator, GntR family; Cellular location: cytoplasm; Similar to strain R6 sequence 15902102 (e-137)
MAIPKYQYIKDELKNKIISGQFSSGDKFYTEAELISMYDVSSITVVRALNDLAKDGYIVRQQGKGTFVSRARKHKLVEFSDIELFNAKDDKVTVLSIERGNKLVYLEKLGLRGDQFYYKIERIRESNGVVYIYHTSYIPEQYINANYPNLEYYSSIYNRFKLDYHIHMNDEHFEEINEIVFPTPEHAASVLGVDEQFPTVLQTKITKLESTGQVLEYSETYKRSDYYKIKFISCDRDH

SEQ ID NO: 4829 - DNA, 99 bp, Streptococcus pneumoniae
ttgggaattgccatatttttacctctattttccttcttccatagaaaattttaccataaaagcgaaaaaaatagtagtcttttgaataaaaaattagaa

SEQ ID NO: 4830 - protein, 33 aa, Streptococcus pneumoniae
  hypothetical protein
MGIAIFLPLFSFFHRKFYHKSEKNSSLLNKKLE

SEQ ID NO: 4831 - DNA, 1785 bp, Streptococcus pneumoniae
atgacacgatttgagatacgagatgatttctatctcgatggaaaatcatttaagattttatctggtgccattcattattttagggttcctccagaggattggtatcattcgctctataacttgaaggctcttggttttaatacggtagagacttatgttgcttggaatttacacgagccttgtgaaggtgagtttcattttgaaggtgatctggatttagagaaatttctccaaatagcgcaggatttgggtctctacgcaattgtgcgtccgtctccatttatctgtgcggaatgggaattcggtggcttaccagcttggctcttgaccaagaacatgcgaattcgctcatccgacccagcatatatcgaggcagttggtcgctactatgatcagttattgccaagactggtgcctcgtttgttggacaatggtggcaatattctcatgatgcaggttgaaaatgagtatggttcttacggagaagataaggcttacctgagagcgattcgacagctaatggaagagtgtggcgtaacctgtcccctctttacatcagatggtccatggcgagctactctgaaagctggaaccttaattgaagaggacctctttgtaacaggaaactttggttctaaggcaccttacaacttttcgcagatgcaggaattctttgatgaacatggtaagaaatggccactcatgtgtatggagttctgggatggttggttcaatcgctggaaagaaccgattatcacacgggatcctaaggaattggcagatgcagttcgagaggttttggaacaaggctctatcaatctttacatgttccacggtggtacaaactttggtttcatgaatggttgctcagctcgaggaactttggacctgccacaagttacgtcttatgattacgatgcccttctggatgaagaaggaaatccaactgctaaatatcttgcagtcaagaagatgatggcaacacatttttcagagtatccgcagttggaaccactctacaaagagagtatggagttggatgctattccactagttgaaaaagtttctttgtttgaaaccttagatagcttgtcaagtcctgtagaaagtctctatcctcaaaagatggaggagctgggacaaagttatggctacctactttatcgaacagaaacaaactgggatgcagaagaagaaagacttcgtatcattgatggtcgagatagggcccagctgtatgtcgatggtcagtgggttaaaactcaatatcagacagagattggggaagatattttttatcaaggtaaaaagaaagggctatctaggttagatatcttgatagaaaatatggggcgtgtcaactatgggcataagttcttagcggatacgcaacgtaagggaattcggacaggggtctgtaaggatctgcatttcttactaaactggaaacactatccactcccactagacaatcctgagaaaattgatttttcaaaaggatggactcaaggacaaccagccttttacgcttatgactttacagtcgaagagccaaaagatacttacctagacttgtctgagtttggtaagggggttgcctttgtcaatgggcagaatctaggacgtttttggaacgttggcccaactctctcactttatatccctcatagctatctcaaggaaggtgccaaccgcatcattatctttgaaacagaaggtcaatataaagaagagattcatttaactcgtaaacctacactaaaacatataaagggggaaaactta

SEQ ID NO: 4832 - protein, 595 aa, Streptococcus pneumoniae
  beta-galactosidase (bga); Cellular location: cytoplasm; Similar to strain R6 sequence 15902103 (0.E+01)
MTRFEIRDDFYLDGKSFKILSGAIHYFRVPPEDWYHSLYNLKALGFNTVETYVAWNLHEPCEGEFHFEGDLDLEKFLQIAQDLGLYAIVRPSPFICAEWEFGGLPAWLLTKNMRIRSSDPAYIEAVGRYYDQLLPRLVPRLLDNGGNILMMQVENEYGSYGEDKAYLRAIRQLMEECGVTCPLFTSDGPWRATLKAGTLIEEDLFVTGNFGSKAPYNFSQMQEFFDEHGKKWPLMCMEFWDGWFNRWKEPIITRDPKELADAVREVLEQGSINLYMFHGGTNFGFMNGCSARGTLDLPQVTSYDYDALLDEEGNPTAKYLAVKKMMATHFSEYPQLEPLYKESMELDAIPLVEKVSLFETLDSLSSPVESLYPQKMEELGQSYGYLLYRTETNWDAEEERLRIIDGRDRAQLYVDGQWVKTQYQTEIGEDIFYQGKKKGLSRLDILIENMGRVNYGHKFLADTQRKGIRTGVCKDLHFLLNWKHYPLPLDNPEKIDFSKGWTQGQPAFYAYDFTVEEPKDTYLDLSEFGKGVAFVNGQNLGRFWNVGPTLSLYIPHSYLKEGANRIIIFETEGQYKEEIHLTRKPTLKHIKGENL

SEQ ID NO: 4833 - DNA, 474 bp, Streptococcus pneumoniae
atgacaattgtaggatgccgtattgatggacgtttgatccacggacaagtagccaatctttgggctggaaaactaaatgtttcacgcattatggttgtagacgacgaagttgtcaacaacgatattgaaaagagtggtttgaaacttgcgacaccaccaggtgtgaaattgagtattttgccagttgagaaagctgcagccaatattcttggtggcaaatacgatagccaacgtctctttatcgtggctcgtaaaccagaccgcttccttggtttggtagaagcaggtgtaccacttgaaacccttaatgttgggaatatgtctcaaacaccagaaactcgttctattacacgttctatcaacgtagtagacaaggatgtggaagacttccacaaactggcagaaaaaggtgttaaacttactgctcagatggttccaaatgatccaatttcagactttttgagcttattaaaa

SEQ ID NO: 4834 - protein, 158 aa, Streptococcus pneumoniae
  PTS system, IIB component; Cellular location: cytoplasm; Similar to strain R6 sequence 15902104 (1.E-85)
MTIVGCRIDGRLIHGQVANLWAGKLNVSRIMVVDDEVVNNDIEKSGLKLATPPGVKLSILPVEKAAANILGGKYDSQRLFIVARKPDRFLGLVEAGVPLETLNVGNMSQTPETRSITRSINVVDKDVEDFHKLAEKGVKLTAQMVPNDPISDFLSLLK

SEQ ID NO: 4835 - DNA, 903 bp, Streptococcus pneumoniae
atgatacaatggtggcaaattttacttctcactttgtactcagcttatcaaatctgtgatgagttgacgatcgtttcatctgcaggttcccctgtatttgctggtttcattactggtttaatcatgggagatgtgactactggtttacttatcggtggtaacttgcaactgttcgttcttggggttggtaccttcggtggtgcttctcgtatcgacgcaacttctggtgcggttcttgcgacagccttctctgtttcacaaggaattgatgcaccgcttgccattactacaatcgctgtaccagtagcagctctcttgacttacttcgacgttcttggtcgtatgactactaccttcttcgctcaccgtgtggatgctgcaatcgaacgctttgactataaaggtattgaacgcaactacttgcttggtgcgattccgtgggctctatctcgtgcccttccagtcttctttgcccttgcttttggtggtgcctttgtacaatcagtagtagacttcgttgaagcctacaaatgggttgcagatggcttgacacttgcaggacgtatgcttccaggtcttggatttgcaatcttgcttcgttaccttccagttaaacgtaaccttcactaccttgctatgggatttggtttgacagctatgttgactgttctttactcatatgtaacaggtcttggtggcgctgttgctggtatcgtaggtactcttcctgctgaagttgctgaaaaaattggtttcgtgaacaacttcaaaggtttgtctatgattggtatttctatcgtaggtattttccttgcagtgcttcacttcaaaaatagccaaaaagtagctgtagcagcaccttctacaccatcagaaagtggggaaatcgaagatgacgaattc

SEQ ID NO: 4836 - protein, 301 aa, Streptococcus pneumoniae
  PTS system, IIC component; Cellular location: membrane; Similar to strain R6 sequence 15902105 (e-169)
MIQWWQILLLTLYSAYQICDELTIVSSAGSPVFAGFITGLIMGDVTTGLLIGGNLQLFVLGVGTFGGASRIDATSGAVLATAFSVSQGIDAPLAITTIAVPVAALLTYFDVLGRMTTTFFAHRVDAAIERFDYKGIERNYLLGAIPWALSRALPVFFALAFGGAFVQSVVDFVEAYKWVADGLTLAGRMLPGLGFAILLRYLPVKRNLHYLAMGFGLTAMLTVLYSYVTGLGGAVAGIVGTLPAEVAEKIGFVNNFKGLSMIGISIVGIFLAVLHFKNSQKVAVAAPSTPSESGEIEDDEF

SEQ ID NO: 4837 - DNA, 828 bp, Streptococcus pneumoniae
gtggggaaatcgaagatgacgaattctaattacaaacttacaaaagaagattttaatcaaatcaacaaacgtagcttgtttactttccaattaggttggaactacgaacgtatgcaagcttctggttacctttacatgatcttgcctcagttgcgtaaaatgtatggtgatggaactcctgaattgaaagaaatgatgaaagttcatactcaattcttcaatacttcaccattcttccataccattatcgctggttttgaccttgccatggaagaaaaagatggtgtaggttcaaaagacgccgttaacggtatcaagacaggtttgatgggaccattcgctcctcttggggatacaatctttggttcacttgtacctgctatcatggggtcagtcgcagcaactatggctatcgctggccaaccttgggggatcttcctttggattgcagttgcagtagcgtatgacatcttccgttggaaacagttggaatttgcttacaaagaaggggttaaccttatcaacaacatgcaaagtaccttgacagctttgattgacgctgcatctgtacttggtgtcttcatgatgggtgctcttgtagcaacagtgattaactttgaaatttcttacaagttgccaatcggtgaaaagatgattgatttccaagacatcttgaaccaaatcttcccacgtttgcttccagcaatctttactgcctttatcttctggttgcttggtaagaaaggtatgaactctactaaagctatcggtattattatcgtacttgctttggctctttctgcccttggtcactttgcacttggaatg

SEQ ID NO: 4838 - protein, 276 aa, Streptococcus pneumoniae
  PTS system, IID component; Cellular location: membrane; Similar to strain R6 sequence 15902106 (e-155)
MGKSKMTNSNYKLTKEDFNQINKRSLFTFQLGWNYERMQASGYLYMILPQLRKMYGDGTPELKEMMKVHTQFFNTSPFFHTIIAGFDLAMEEKDGVGSKDAVNGIKTGLMGPFAPLGDTIFGSLVPAIMGSVAATMAIAGQPWGIFLWIAVAVAYDIFRWKQLEFAYKEGVNLINNMQSTLTALIDAASVLGVFMMGALVATVINFEISYKLPIGEKMIDFQDILNQIFPRLLPAIFTAFIFWLLGKKGMNSTKAIGIIIVLALALSALGHFALGM

SEQ ID NO: 4839 - DNA, 402 bp, Streptococcus pneumoniae
atgactaaatcattaattttggtgagccatggtcgcttctgtgaggagcttagaggtagcacagaaatgattatgggcccacaagacaacatttacacagtagctcttcttccagaagatggcccagaagaatttactgctaaatttgaagctgttattgaaggattggatgatttcctagtctttgcggatcttctcggtgggacaccttgtaatgtggtgagtcgcttgatcatggaaggtcgtgatattgacctttacgcagggatgaatcttccaatggtgattgaatttatcaatgcgagccttacaggcgcagatgcggactacaagagccgtgctgcagaaagcattgtgaaagttaatgacctgttagcgggcttcgatgatgacgaagatgaa

SEQ ID NO: 4840 - protein, 134 aa, Streptococcus pneumoniae
  PTS system, IIA component; Cellular location: cytoplasm; Similar to strain R6 sequence 15902107 (1.E-73)
MTKSLILVSHGRFCEELRGSTEMIMGPQDNIYTVALLPEDGPEEFTAKFEAVIEGLDDFLVFADLLGGTPCNVVSRLIMEGRDIDLYAGMNLPMVIEFINASLTGADADYKSRAAESIVKVNDLLAGFDDDEDE

SEQ ID NO: 4841 - DNA, 1164 bp, Streptococcus pneumoniae
atgctacattatacaaaagaagacttgctcgaattgggtgcagaaatcactacgcgtgaaatctaccaacagcctgatgtatggagagaagcttttgaattttatcaagcaaaacgtgaagaaattgcagccttcctacaagaaatcgctgataaacatgactatattaaggttatcttgacaggtgctgggacttctgcttatgtgggagataccttgctaccttattttaaggaagtctatgacgaacgcaaatggaatttcaatgctattgcgacaacagatatcgttgccaatccagcaacctatttgaaaaaagatgtggcaactgtccttgtgtcttttgctcgtagtgggaattcgcctgaaagtttggcgactgttgatttggccaaatccttggtggatgagctttatcaagtgacgattacttgtgcagcagatggtaaattggctcttcaagctcacggtgatgatcgtaatctcttgctcttgcaaccagctgtctctaatgatgctggatttgccatgacttctagctttacgtctatgatgttgacaactctcttggtctttgatcctacagaatttgctgttaagtctgaacgttttgaagttgtatctagtcttgcccgtaaagttttagacaaggcagaagatgtcaaagagctcgttgatttagactttaaccgtgtcatctatctaggcgctggtcctttctttggacttgctcatgaagctcagctcaagattttggaattaactgctggtcaagttgcgaccatgtatgaaagcccagttggcttccgtcacggtccaaaatctcttatcaacgacaatacagttgttttggtctttggtacaacgacagactacactcgtaagtacgacttggacttggttcgtgaagttgctggtgaccagattgctcgtcgtgttgtgcttttgagtgatcaagcttttggtcttgaaaatgtcaaagaagtggcccttggttgtggcggtgtcttgaatgatatttaccgtgtcttcccttacatcgtttatgcccaactctttgctttattgacttcactcaaggtagaaaataaaccagatacaccgtctcctacaggtacagtaaaccgtgtagtacaaggtgtcataattcacgaatatcaaaag

SEQ ID NO: 4842 - protein, 388 aa, Streptococcus pneumoniae
  sugar isomerase domain protein AgaS (agaS); Cellular location: membrane; Similar to strain R6 sequence 15902108 (0.E+01)
MLHYTKEDLLELGAEITTREIYQQPDVWREAFEFYQAKREEIAAFLQEIADKHDYIKVILTGAGTSAYVGDTLLPYFKEVYDERKWNFNAIATTDIVANPATYLKKDVATVLVSFARSGNSPESLATVDLAKSLVDELYQVTITCAADGKLALQAHGDDRNLLLLQPAVSNDAGFAMTSSFTSMMLTTLLVFDPTEFAVKSERFEVVSSLARKVLDKAEDVKELVDLDFNRVIYLGAGPFFGLAHEAQLKILELTAGQVATMYESPVGFRHGPKSLINDNTVVLVFGTTTDYTRKYDLDLVREVAGDQIARRVVLLSDQAFGLENVKEVALGCGGVLNDIYRVFPYIVYAQLFALLTSLKVENKPDTPSPTGTVNRVVQGVIIHEYQK

SEQ ID NO: 4843 - DNA, 1035 bp, Streptococcus pneumoniae
atgaaagcatacacagagcgtgtatttggaaatgttgagggtgaggatgtcttggcctatcgatttgagacagacggtggctaccaacttgaggttatgacttatggtgcgactatcttgcgctatgtcgcacctgacaaggctggaaattttgccaatgttatcttgggatttgatgactttgatagttatgtaggcaatagtcccaagcatggagcaagtgtaggtcctgtagcgggtcgtattgcaggtgcgacctttgagctcaatggtaagacctatgaccttgaggttaataatgctagcaactgtaatcacagtggttcaactggttgggattccagcttgtttgaagttgaagaagtaagcgatcatggcttgactctctacacagagcgtacagatgggacaggagggttccctggaaatctcaagatttggatcagttatcacttggaagaaactggtgcctatgaaatcagctacaaggtaacgaccgatcaggatacgctggtcaatccaaccaaccacagctatttcaacttgtctggtgatttcacgcagacgattgaccgtcatgtcttccaactaaacacagagggcatttactcaatcgctcctgacggtgttcctgccaaaactccagaagccaaccgtgatgtggtcaaacacgtctacaatggtaccttgttgaaggatatctttgcagaagaagatgagcaaatccagctggcatcaggtttggatcatccatttgcccttcctgcaggccatgacaatgctggattcctttatgaccaaaattcaggtcgcttcctgcttttcaagacagaagctccttgctttgtggtctacacagcaaactttgtggatgaaagtgtcatcataggaggtcagccaatgctacagcacaatgggattgctcttgaagcgcaagctttaccagatgccattcacagtgaccttaaaggccaagtcattcttaaagctggtcaaaccttcaccagtaagacacgttatgaacttgttgtgaag

SEQ ID NO: 4844 - protein, 345 aa, Streptococcus pneumoniae
  aldose 1-epimerase (galM); Cellular location: cytoplasm; Similar to strain R6 sequence 15902109 (0.E+01)
MKAYTERVFGNVEGEDVLAYRFETDGGYQLEVMTYGATILRYVAPDKAGNFANVILGFDDFDSYVGNSPKHGASVGPVAGRIAGATFELNGKTYDLEVNNASNCNHSGSTGWDSSLFEVEEVSDHGLTLYTERTDGTGGFPGNLKIWISYHLEETGAYEISYKVTTDQDTLVNPTNHSYFNLSGDFTQTIDRHVFQLNTEGIYSIAPDGVPAKTPEANRDVVKHVYNGTLLKDIFAEEDEQIQLASGLDHPFALPAGHDNAGFLYDQNSGRFLLFKTEAPCFVVYTANFVDESVIIGGQPMLQHNGIALEAQALPDAIHSDLKGQVILKAGQTFTSKTRYELVVK

SEQ ID NO: 4845 - DNA, 258 bp, Streptococcus pneumoniae
ttggctttgaccttggctggagcagttttgacaaatgatgtttttgcgaacgacagacttgtggcaacacaaactactgatggtaaaaatgaaaatgtattgacctcagaggtgctaaaaccttctagtggcaatgttttggttggaatcaaaggagaatttgtggctcctcatcaacaatctattttggatgccatcaatgctatctgtaaagaagcggctgacgaaggtttggtagataagtatgtccctatcaaa

SEQ ID NO: 4846 - protein, 86 aa, Streptococcus pneumoniae
  hypothetical protein; Cellular location: outside
MALTLAGAVLTNDVFANDRLVATQTTDGKNENVLTSEVLKPSSGNVLVGIKGEFVAPHQQSILDAINAICKEAADEGLVDKYVPIK

SEQ ID NO: 4847 - DNA, 195 bp, Streptococcus pneumoniae
atggatcatacccgtctttctagcaaagatctttggagtgcctttccaacttctaatagtataatgggagaaaatttggcatggaatcatgacggttttctaaaagctattgaacaatggcgtgctgaaaaagcagattatgtggagaaaaaaatagtggttcagacaacgggaaatctggtcactatgagtcgc

SEQ ID NO: 4848 - protein, 65 aa, Streptococcus pneumoniae
  hypothetical protein; Cellular location: cytoplasm
MDHTRLSSKDLWSAFPTSNSIMGENLAWNHDGFLKAIEQWRAEKADYVEKKIVVQTTGNLVTMSR

SEQ ID NO: 4849 - DNA, 633 bp, Streptococcus pneumoniae
atggggatggcagcttttaaaaatcctaacaatcaatacaaagctattacaattgctcaaactctaggtgatgatgcttcttcagaggaattggctggtagatatggttctgctgttcagtgtacagaagtgactgcctcaaacctttcaacagttaaaactaaagctacggttgtagaaaaaccactgaaagattttagagcgtctacgtctgatcagtctggttgggtggaatctaatggtaaatggtatttctatgagtctggtgatgtgaagacaggttgggtgaaaacagatggtaaatggtactatttgaatgacttaggtgtcatgcagactggatttgtaaaattttctggtagctggtattacttgagcaattcaggtgctatgtttacaggctggggaacagatggtagcagatggttctactttgacggctcaggagctatgaagacaggctggtacaaggaaaatggcacttggtattaccttgacgaagcaggtatcatgaagacaggttggtttaaagtcggaccacactggtactatgcctacggttcaggagctttggctgtgagcacaacaacaccagatggttaccgtgtaaatggtaatggtgaatgggtaaac

SEQ ID NO: 4850 - protein, 211 aa, Streptococcus pneumoniae
  choline binding protein I (cbpI); Cellular location: cytoplasm; Feature of note: WYY motif; Similar to strain R6 sequence 15903986 (7.E-51)
MGMAAFKNPNNQYKAITIAQTLGDDASSEELAGRYGSAVQCTEVTASNLSTVKTKATVVEKPLKDFRASTSDQSGWVESNGKWYFYESGDVKTGWVKTDGKWYYLNDLGVMQTGFVKFSGSWYYLSNSGAMFTGWGTDGSRWFYFDGSGAMKTGWYKENGTWYYLDEAGIMKTGWFKVGPHWYYAYGSGALAVSTTTPDGYRVNGNGEWVN

SEQ ID NO: 4851 - DNA, 114 bp, Streptococcus pneumoniae
ttgaggcgacaagaatccaatctttataaatcaaaagaggccaatgttcgccatcaacctctttcttatcgttcattctttttgctaagtaagatgaatgctttacctatggcc

SEQ ID NO: 4852 - protein, 38 aa, Streptococcus pneumoniae
  hypothetical protein
MRRQESNLYKSKEANVRHQPLSYRSFFLLSKMNALPMA

SEQ ID NO: 4853 - DNA, 99 bp, Streptococcus pneumoniae
atgaacgataagaaagaggttgatggcgaacattggcctcttttgatttataaagattggattcttgtcgcctcaatttcagacttttctattgtaagc

SEQ ID NO: 4854 - protein, 33 aa, Streptococcus pneumoniae
  hypothetical protein; Cellular location: cytoplasm
MNDKKEVDGEHWPLLIYKDWILVASISDFSIVS

SEQ ID NO: 4855 - DNA, 5568 bp, Streptococcus pneumoniae
atgagccgaaaaagcattggtgagaaacgccatagtttctcgatgagaaagttgtcagtgggattggtatcagttactgtatctagtttctttttgatgagtcaagggattcaatcggtatcggccgataatatggaaagtccaattcattataagtatatgaccgagggtaaattgacagacgaggaaaaatccttgctggtagaggcccttccacaactggctgaagaatcagatgatacttattacttggtttatagatctcaacagtttttaccgaatacaggttttaacccaactgttggtactttcctttttactgcaggattgagcttgttagttttattggtttctaaaagggaaaatggaaagaaacgacttgttcattttctgctgttgactagcatgggagttcaattgttgccggccagtgcttttgggttgaccagccagattttatctgcctataatagtcagctttctatcggagtcggggaacatttaccagagcctctgaaaatcgaaggttatcaatatattggttatatcaaaactaagaaacaggataatacagagctttcaaggacagttgatgggaaatactctgctcaaagagatagtcaaccaaactctacaaaaacatcagatgtagttcattcagctgatttagaatggaaccaaggacaggggaaggttagtttacaaggtgaagcatcaggggatgatggactttcagaaaaatcttctatagcagcagacaatctatcttctaatgattcattcgcaagtcaagttgagcagaatccggatcacaaaggagaatctgtagttcgaccaacagtgccagaacaaggaaatcctgtgtctgctacaacggtgcagagtgcggaagaggaagtattggcgacgacaaatgatcgaccagagtataaacttccattggaaaccaaaggcacgcaagaacccggtcatgagggtgaagccgcagtccgtgaagacttaccagtctacactaagccactagaaaccaaaggtacacaaggacccggacatgaaggtgaagctgcagttcgcgaggaagaaccagcttacacagaaccgttagcaacgaaaggcacgcaagagccaggtcatgagggcaaagctacagtccgcgaagagactctagagtacacggaaccggtagcgacaaaaggcacacaagaacccgaacatgagggcgaagcggcagtagaagaagaacttccggctttagaggtcactacacgaaatagaacggaaatccagaatattccttatacaacagaagaaattcaggatccaacacttctgaaaaatcgtcgtaagattgaacgacaagggcaagcagggacacgtacaattcaatatgaagactacatcgtaaatggtaatgtcgtagaaactaaagaagtgtcacgaactgaagtagctccggtcaacgaagtcgttaaagtaggaacacttgtgaaagttaaacctacagtagaaattacaaacttaacaaaagttgagaacaaaaaatctataactgtaagttataacttaatagacactacctcagcatatgtttctgcaaaaacgcaagttttccatggagacaagctagttaaagaggtggatatagaaaatcctgccaaagagcaagtaatatcaggtttagattactacacaccgtatacagttaaaacacacctaacttataatttgggtgaaaataatgaggaaaatactgaaacatcaactcaagatttccaattagagtataagaaaatagagattaaagatattgattcagtagaattatacggtaaagaaaatgatcgttatcgtagatatttaagtctaagtgaagcgccgactgatacggctaaatactttgtaaaagtgaaatcagatcgcttcaaagaaatgtacctacctgtaaaatctattacagaaaatacggatggaacgtataaagtgacggtagccgttgatcaacttgtcgaagaaggtacagacggttacaaagatgattacacatttactgtagctaaatctaaagcagagcaaccaggagtttacacatcctttaaacagctggtaacagccatgcaaagcaatctgtctggtgtctatacattggcttcagatatgaccgcagatgaggtgagcttaggcgataagcagacaagttatctcacaggtgcatttacagggagcttgatcggttctgatggaacaaaatcgtatgccatttatgatttgaagaaaccattatttgatacattaaatggtgctacagttagagatttggatattaaaactgtttctgctgatagtaaagaaaatgtcgcagcgctggcgaaggcagcgaatagcgcgaatattaataatgttgcagtagaaggaaaaatctcaggtgcgaaatctgttgcgggattagtagcgagcgcaacaaatacagtgatagaaaacagctcgtttacagggaaacttatcgcaaatcaccaggacagtaataaaaatgatactggaggaatagtaggtaatataacaggaaatagttcgagagttaataaagttagggtagatgccttaatctctactaatgcacgcaataataaccaaacagctggagggatagtaggtagattagaaaatggtgcattgatatctaattcggttgctactggagaaatacgaaatggtcaaggatattctagagtcggaggaatagtaggatctacgtggcaaaacggtcgagtaaataatgttgtgagtaacgtagatgttggagatggttatgttatcaccggtgatcaatacgcagcagcagatgtgaaaaatgcaagtacatcagttgataatagaaaagcagacagattcgctacaaaattatcaaaagaccaaatagacgcgaaagttgctgattatggaatcacagtaactcttgatgatactgggcaagatttaaaacgtaatctaagagaagttgattatacaagactaaataaagcagaagctgaaagaaaagtagcttatagcaacatagaaaaactgatgccattctacaataaagacctagtagttcactatggtaacaaagtagcgacaacagataaactttacactacagaattgttagatgttgtgccgatgaaagatgatgaagtagtaacggatattaataataagaaaaattcaataaataaagttatgttacatttcaaagataatacagtagaatacctagatgtaacattcaaagaaaacttcataaacagtcaagtaatcgaatacaatgttacaggaaaagaatatatattcacaccagaagcatttgtttcagactatacagcgataacgaataacgtactaagcgacttgcaaaatgtaacacttaactcagaagctactaaaaaagtactaggagcagcgaatgatgcagccttagataacctatacttagatagacaatttgaagaagttaaagctaatatagcagaacacctaagaaaagtattagcgatggataaatcaatcaatactacaggagacggtgtagttgaatacgtaagtgagaaaatcaaaaataacaaagaagcatttatgctaggtcttacttatatgaaccgttggtacgatattaattatggtaaaatgaatacaaaagatttatctacgtacaagtttgactttaacggaaataatgagacttcaacgttggatactattgtcgcattaggaaatagtggactagataacctgagagcttcaaatactgtaggtttatatgcgaataaacttgcatcggtaaaaggagaagattcagtctttgacttcgtagaagcgtatagaaaactgttcttaccaaacaaaacaaataacgagtggtttaaagaaaatacaaaggcatatatagtcgaaatgaagtctgatattgcagaagtacgagaaaaacaagaatcaccaacagccgatagaaaatattcattaggagtttacgatagaatatcagcaccaagttgggggcataagagtatgttattaccactactaactttacctgaagaatctgtgtatatttcatcgaatatgtctacacttgcattcggttcgtatgaaagatatcgtgatagtgtggatggagttattctttcaggagatgctttacgaacttatgtaagaaatagagttgatatagcagcgaaaaggcatagagaccattatgatatttggtacaatcttcttgacagtgcttcaaaagaaaaacttttccgttctgtgatagtttatgatggattcaatgtaaaagatgagacaggaagaacttattgggcaaggttaacggataaaaacatcggctctattaaagaattcttcggacctgttgggaaatggtatgagtataatagtagtgcaggagcgtatgcgaatggaagtttaacgcactttgtgttagatagattattagatgcttatggaacgtcggtttatactcatgaaatggttcataattctgattctgcaatctactttgaaggaaatggtagacgtgaaggattgggagcggagttatacgcacttggtttactgcaatctgtagatagtgtaaattctcatattttagctttaaatacgttatataaagcagaaaaagatgatttgaatagattgcatacatataatccggtggaacgtttcgattcggatgaggcgcttcaaagttatatgcatggatcatatgatgtaatgtatacacttgatgcgatggaagcaaaagcgatattagctcaaaataatgatgttaagaaaaaatggtttagaaaaatagaaaattattacgttcgtgatactagacataataaagatacacatgcaggaaataaagtccgtccattaacagatgaagaagtagctaacttaacatcgttaaactcattaatcgacaacgacatcataaatagacgtagctatgatgatagtagagaatataaacgaaatggctactatactataagtatgttctctcctgtatacgcagcgctaagcaattcgaaaggtgctcctggagatattatgtttagaaaaatagcttatgaattacttgcggaaaaaggttatcacaaaggattcctaccttatgtttctaatcagtacggagcagaagcatttgccagcggaagcaaaacattctcatcatggcatggaagagatgttgctttagtgacagatgatttagtatttaagaaagtattcaatggtgagtactcatcatgggctgatttcaaaaaagcaatgtttaaacaacgtatagataaacaagataatctgaaaccaataacaattcaatacgaattaggtaatcctaatagtacaaaagaagtaactataacaacggctgcacaaatgcaacaattaattaatgaagcggctgcgaaagatattactaatatagatcgtgcaacgagtcataccccagcaagttgggtgcatttattaaaacaaaaaatctataatgcatatcttcgcactacagatgactttagaaattctatatataaa

SEQ ID NO: 4856 - protein, 1856 aa, Streptococcus pneumoniae
  immunoglobulin A1 protease (iga); Cellular location: Peptidoglycan-bound (LPXTG); Similar to strain R6 sequence 15903086 (0.E+01)
MSRKSIGEKRHSFSMRKLSVGLVSVTVSSFFLMSQGIQSVSADNMESPIHYKYMTEGKLTDEEKSLLVEALPQLAEESDDTYYLVYRSQQFLPNTGFNPTVGTFLFTAGLSLLVLLVSKRENGKKRLVHFLLLTSMGVQLLPASAFGLTSQILSAYNSQLSIGVGEHLPEPLKIEGYQYIGYIKTKKQDNTELSRTVDGKYSAQRDSQPNSTKTSDVVHSADLEWNQGQGKVSLQGEASGDDGLSEKSSIAADNLSSNDSFASQVEQNPDHKGESVVRPTVPEQGNPVSATTVQSAEEEVLATTNDRPEYKLPLETKGTQEPGHEGEAAVREDLPVYTKPLETKGTQGPGHEGEAAVREEEPAYTEPLATKGTQEPGHEGKATVREETLEYTEPVATKGTQEPEHEGEAAVEEELPALEVTTRNRTEIQNIPYTTEEIQDPTLLKNRRKIERQGQAGTRTIQYEDYIVNGNVVETKEVSRTEVAPVNEVVKVGTLVKVKPTVEITNLTKVENKKSITVSYNLIDTTSAYVSAKTQVFHGDKLVKEVDIENPAKEQVISGLDYYTPYTVKTHLTYNLGENNEENTETSTQDFQLEYKKIEIKDIDSVELYGKENDRYRRYLSLSEAPTDTAKYFVKVKSDRFKEMYLPVKSITENTDGTYKVTVAVDQLVEEGTDGYKDDYTFTVAKSKAEQPGVYTSFKQLVTAMQSNLSGVYTLASDMTADEVSLGDKQTSYLTGAFTGSLIGSDGTKSYAIYDLKKPLFDTLNGATVRDLDIKTVSADSKENVAALAKAANSANINNVAVEGKISGAKSVAGLVASATNTVIENSSFTGKLIANHQDSNKNDTGGIVGNITGNSSRVNKVRVDALISTNARNNNQTAGGIVGRLENGALISNSVATGEIRNGQGYSRVGGIVGSTWQNGRVNNVVSNVDVGDGYVITGDQYAAADVKNASTSVDNRKADRFATKLSKDQIDAKVADYGITVTLDDTGQDLKRNLREVDYTRLNKAEAERKVAYSNIEKLMPFYNKDLVVHYGNKVATTDKLYTTELLDVVPMKDDEVVTDINNKKNSINKVMLHFKDNTVEYLDVTFKENFINSQVIEYNVTGKEYIFTPEAFVSDYTAITNNVLSDLQNVTLNSEATKKVLGAANDAALDNLYLDRQFEEVKANIAEHLRKVLAMDKSINTTGDGVVEYVSEKIKNNKEAFMLGLTYMNRWYDINYGKMNTKDLSTYKFDFNGNNETSTLDTIVALGNSGLDNLRASNTVGLYANKLASVKGEDSVFDFVEAYRKLFLPNKTNNEWFKENTKAYIVEMKSDIAEVREKQESPTADRKYSLGVYDRISAPSWGHKSMLLPLLTLPEESVYISSNMSTLAFGSYERYRDSVDGVILSGDALRTYVRNRVDIAAKRHRDHYDIWYNLLDSASKEKLFRSVIVYDGFNVKDETGRTYWARLTDKNIGSIKEFFGPVGKWYEYNSSAGAYANGSLTHFVLDRLLDAYGTSVYTHEMVHNSDSAIYFEGNGRREGLGAELYALGLLQSVDSVNSHILALNTLYKAEKDDLNRLHTYNPVERFDSDEALQSYMHGSYDVMYTLDAMEAKAILAQNNDVKKKWFRKIENYYVRDTRHNKDTHAGNKVRPLTDEEVANLTSLNSLIDNDIINRRSYDDSREYKRNGYYTISMFSPVYAALSNSKGAPGDIMFRKIAYELLAEKGYHKGFLPYVSNQYGAEAFASGSKTFSSWHGRDVALVTDDLVFKKVFNGEYSSWADFKKAMFKQRIDKQDNLKPITIQYELGNPNSTKEVTITTAAQMQQLINEAAAKDITNIDRATSHTPASWVHLLKQKIYNAYLRTTDDFRNSIYK

SEQ ID NO: 4857 - DNA, 111 bp, Streptococcus pneumoniae
atgcagattgcaggaatcatcttcaactcatcaacgaccaatggtgacaaggtggatttcaatcccacagaaaatgttgatttgagaaataactttgctagtctagtaaaa

SEQ ID NO: 4858 - protein, 37 aa, Streptococcus pneumoniae
  hypothetical protein
MQIAGIIFNSSTTNGDKVDFNPTENVDLRNNFASLVK

SEQ ID NO: 4859 - DNA, 852 bp, Streptococcus pneumoniae
atgacatatgaataccagagccacatttatttagcagaggcagttttaaatgtgaaggatttggtcagtcaaacagttttttatcagcagattattggtttagaaatcctatctcaaacggatacagaggtcgttctgggacttggaggaaaagccttggtacacttgattcaagcacaagagggtggagaagtaagggaacattatggtctttaccatctggctattcttttgccgacacgaaaggctttggcggatgtcttgaagcacctgacggatttacagattcctcttgttggcggtgcagatcacggttacagtgaggccctttacttagaggacttggagggaaatggcattgaactctatcgagataagccagtttccacatgggatattcgagaagatggacgtattatcggggtgactgaagtccttgcggctcaggatatctatgagttgggggaaagagtagagccttttatcctagcagagggtacgagaatggggcatattcatctttctgtcaaggatagtcgaaagtccagacagttttatcaaacggtgttagggctcgaggataaattcagtgtgcctagtgctagttggatcgcagctggggactaccatcatcatttagcagtcaacgaatggggaggaaaaggtctggatccgcgtaaacaagtcctaccaggtttagcctactatgtcatcgaagtcgcacataaagaagaactgttaacgattgcccaacgagcacaagaagttgacgcaccaatcaaatggatgacatcgatccaattggaaatcacagactcagatggcatcgtgacccgtattcgtttagctaga

SEQ ID NO: 4860 - protein, 284 aa, Streptococcus pneumoniae
  conserved hypothetical protein; Cellular location: cytoplasm; Similar to strain R6 sequence 15902110 (e-149)
MTYEYQSHIYLAEAVLNVKDLVSQTVFYQQIIGLEILSQTDTEVVLGLGGKALVHLIQAQEGGEVREHYGLYHLAILLPTRKALADVLKHLTDLQIPLVGGADHGYSEALYLEDLEGNGIELYRDKPVSTWDIREDGRIIGVTEVLAAQDIYELGERVEPFILAEGTRMGHIHLSVKDSRKSRQFYQTVLGLEDKFSVPSASWIAAGDYHHHLAVNEWGGKGLDPRKQVLPGLAYYVIEVAHKEELLTIAQRAQEVDAPIKWMTSIQLEITDSDGIVTRIRLAR

SEQ ID NO: 4861 - DNA, 660 bp, Streptococcus pneumoniae
atggtatgtgatgaaggtagagcatcaattgtagaaagtgctccttattctagtcagatacgtggaaaatttgatatgatagtagggaataaggagaagaataatatgactagcgaataccagaaaatgatagcaggagagttttaccgtccatcagacccagaactgagagccttagctcaggcttctcgccaaaaacaggccgcctttaacaaggaagagaaccccttgaagggagccgaaatcatcaagacttggtttgcctcaaccgggaaaaatctttacatcaacactcgcttgatggtggactacggtgtcaacatccatctaggggaaaatttttattctaattggaacttgaccatgctggatatctgtcccattcgtatcggggacaatgctatgattggtcctaattgtcagtttttgacacccctccatccactagatccacaggaacgcaattcaggtatcgagtacggaaagcctatcacaatcggagataatttctggactggtggtggcgtcattgtccttcctggagtgacactgggaaataatgtcgttgcaggagcaggggcagtaattaccaaatcttttggcgacaacgttgtcctagctggcaatcctgcgcgcgtgattaaggaaatacctgttaaa

SEQ ID NO: 4862 - protein, 220 aa, Streptococcus pneumoniae
  acetyltransferase, CysE/LacA/LpxA/NodL family; Cellular location: cytoplasm; Similar to strain R6 sequence 15903948 (1.E-11)
MVCDEGRASIVESAPYSSQIRGKFDMIVGNKEKNNMTSEYQKMIAGEFYRPSDPELRALAQASRQKQAAFNKEENPLKGAEIIKTWFASTGKNLYINTRLMVDYGVNIHLGENFYSNWNLTMLDICPIRIGDNAMIGPNCQFLTPLHPLDPQERNSGIEYGKPITIGDNFWTGGGVIVLPGVTLGNNVVAGAGAVITKSFGDNVVLAGNPARVIKEIPVK

SEQ ID NO: 4863 - DNA, 762 bp, Streptococcus pneumoniae
atgattcagaaacatgcgattcctattttagagtttgatgacaatcctcaggcggttatcatgcccaatcacgaggggctggacttgcagttgccaaagaagtgtgtttatgcatttttaggtgaggagattgaccgctatgcgagggaagtaggggcgaactgtgttggcgaatttgtttctgccaccaagacctatccagtttatgtcgtgaactacaaggacgaggaggtctgtctggctcaggctcctgttggctccgctccagcagcccagtttatggattggttgattggctatggtgtggagcagattatctctactgggacctgtggtgtcctagctgatatagaggaaaatgcctttctagtccctgttcgcgctctgcgagatgaaggagccagttaccactatgtggcaccttgtcgttatatggaaatgcagccagaggctattgctgctattgaggaagttttggaagacagagggattccttatgaagaagtcatgacctggacgacagacggtttttaccgagaaacggctgaaaaggtggcttatcgtaaggaagaaggctgtgctgttgtggagatggagtgttctgctcttgcggcagtagctcaattgcgtggggttctctggggtgaattgttgttcacagcagattctctagcggacttggaccagtacgacagtcgtgactggggctcggaagcttttaataaggcgctagaactgagtttagcaagtgttcaccacctt

SEQ ID NO: 4864 - protein, 254 aa, Streptococcus pneumoniae
  phosphorylase, Pnp/Udp family; Cellular location: cytoplasm; Similar to strain R6 sequence 15902112 (e-135)
MIQKHAIPILEFDDNPQAVIMPNHEGLDLQLPKKCVYAFLGEEIDRYAREVGANCVGEFVSATKTYPVYVVNYKDEEVCLAQAPVGSAPAAQFMDWLIGYGVEQIISTGTCGVLADIEENAFLVPVRALRDEGASYHYVAPCRYMEMQPEAIAAIEEVLEDRGIPYEEVMTWTTDGFYRETAEKVAYRKEEGCAVVEMECSALAAVAQLRGVLWGELLFTADSLADLDQYDSRDWGSEAFNKALELSLASVHHL

SEQ ID NO: 4865 - DNA, 90 bp, Streptococcus pneumoniae
ttgatagatgtgactataggtcaaaaaagcaagacaggagcttttaacgccagctactctatatgcttttcaggagaaaatttctctttt

SEQ ID NO: 4866 - protein, 30 aa, Streptococcus pneumoniae
  hypothetical protein; Cellular location: cytoplasm
MIDVTIGQKSKTGAFNASYSICFSGENFSF

SEQ ID NO: 4867 - DNA, 156 bp, Streptococcus pneumoniae
ttgacctatagtcacatctatcaagtattgttcttgcctaagctatcaataaaaaggtggcattttttaggcttggtgttagtagattttgccttatcctatctaagtcatttcgaactttttatggtacaatggaaacatgttattcaaattatc

SEQ ID NO: 4868 - protein, 52 aa, Streptococcus pneumoniae
  hypothetical protein; Cellular location: membrane; Similar to strain R6 sequence 15902113 (3.E-26)
MTYSHIYQVLFLPKLSIKRWHFLGLVLVDFALSYLSHFELFMVQWKHVIQII

SEQ ID NO: 4869 - DNA, 1377 bp, Streptococcus pneumoniae
atgttattcaaattatctaaggaaaaaatagagctaggcttatctcgtttatcgccagcccgtcgtatttttttgagttttgccttggtcattttactaggctctcttcttttgagcttgccctttgtccaagttgaaagctcacgagcgacttattttgatcatcttttcactgctgtctctgcagtctgtgtgacgggtctctcaacccttccagtagctcacacctataatatctggggtcaaataatctgtttgctcttgattcagatcggtggtctagggctcatgacctttattggggttttctatatccagagcaagcaaaagcttagtcttcgtagccgtgcaactattcaggatagttttagttatggagaaactcgatctttgagaaagtttgtctattctatttttctcacgacctttttggttgagagcttgggagctattttgcttagttttcgccttattcctcaacttggctggggacgtggtctttttagttccatttttctagcgatctcagccttctgtaatgccggttttgataatttagggagcaccagtttatttgcttttcagaccgatttactggtcaatctggtgattgcaggcttgattattacaggcggccttggttttatggtctggtttgatttggctggtcatgtaggaagaaagaaaaaaggacgtctgcactttcatacgaagcttgtactattattgactataggtttgttgttatttggaacagcaactactctctttcttgagtggaacaatgctggaacgattggcaatctccctgttgccgataaggttttagttagcttttttcaaacagtgacgatgcgaacagctggcttttctacgatagattatactcaggctcatcctgtgactcttttgatttatatcttacagatgtttctaggtggggcacctggaggaacagctgggggactcaagattacgacattttttgtcctcttggtctttgcacgaagtgagcttctaggcttgcctcatgccaatgttgcgagacgaacgatcgcgccgcgaacggttcaaaaatcctttagtgtctttattatctttttgatgagcttcttgataggattgattctgctagggataacagccaaaggcaatcctccctttatccacctcgtatttgaaaccatttcagctcttagtacagttggtgtaacggcaaatctgactcctgaccttgggaaattggctctcagtgttatcatgccacttatgtttatgggacgaattggtcccttgaccttgtttgttagcttggcagattaccatccagaaaagaaagatatgattcactatatgaaagcagatattagtattggt

SEQ ID NO: 4870 - protein, 459 aa, Streptococcus pneumoniae
  potassium uptake protein, Trk family; Cellular location: membrane; Similar to strain R6 sequence 15902114 (0.E+01)
MLFKLSKEKIELGLSRLSPARRIFLSFALVILLGSLLLSLPFVQVESSRATYFDHLFTAVSAVCVTGLSTLPVAHTYNIWGQIICLLLIQIGGLGLMTFIGVFYIQSKQKLSLRSRATIQDSFSYGETRSLRKFVYSIFLTTFLVESLGAILLSFRLIPQLGWGRGLFSSIFLAISAFCNAGFDNLGSTSLFAFQTDLLVNLVIAGLIITGGLGFMVWFDLAGHVGRKKKGRLHFHTKLVLLLTIGLLLFGTATTLFLEWNNAGTIGNLPVADKVLVSFFQTVTMRTAGFSTIDYTQAHPVTLLIYILQMFLGGAPGGTAGGLKITTFFVLLVFARSELLGLPHANVARRTIAPRTVQKSFSVFIIFLMSFLIGLILLGITAKGNPPFIHLVFETISALSTVGVTANLTPDLGKLALSVIMPLMFMGRIGPLTLFVSLADYHPEKKDMIHYMKADISIG

SEQ ID NO: 4871 - DNA, 663 bp, Streptococcus pneumoniae
atgtcagatcgtacgattggaattttgggcttgggaatttttgggagcagtgtcctagctgccctagccaagcaggatatgaatattatcgctattgatgaccacgcagagcgcatcaatcagtttgagccagttttggcgcgtggagtgattggtgacatcacagatgaagaattattgagatcagcagggattgatacctgcgataccgttgtagtcgcgacaggtgaaaatctggagtcgagtgtgcttgcggttatgcactgtaagagtttgggggtaccgactgttattgctaaggtcaaaagtcagaccgctaagaaagtgctagaaaagattggagctgactcggttatctcgccagagtatgaaatggggcagtctctagcacagaccattcttttccataatagtgttgatgtctttcagttggataaaaatgtgtctatcgtggagatgaaaattcctcagtcttgggcaggtcaaagtctgagtaaattagacctccgtggcaaatacaatctgaatattttgggtttccgagagcaggaaaattccccattggatgttgaatttggaccagatgacctcttgaaagcagatacctatattttggcagtcatcaacaaccagtatttggataccctagtagcattgaattcg

SEQ ID NO: 4872 - protein, 221 aa, Streptococcus pneumoniae
  potassium uptake protein, Trk family; Cellular location: outside; Similar to strain R6 sequence 15902115 (e-121)
MSDRTIGILGLGIFGSSVLAALAKQDMNIIAIDDHAERINQFEPVLARGVIGDITDEELLRSAGIDTCDTVVVATGENLESSVLAVMHCKSLGVPTVIAKVKSQTAKKVLEKIGADSVISPEYEMGQSLAQTILFHNSVDVFQLDKNVSIVEMKIPQSWAGQSLSKLDLRGKYNLNILGFREQENSPLDVEFGPDDLLKADTYILAVINNQYLDTLVALNS

SEQ ID NO: 4873 - DNA, 105 bp, Streptococcus pneumoniae
ttgatgcctaagatggcaaatagagacagaagccccttgtcttctagtaaaagttcttcaaaggctggactttatggtaaaatagaaagaagtgacaagagagag

SEQ ID NO: 4874 - protein, 35 aa, Streptococcus pneumoniae
  hypothetical protein; Cellular location: cytoplasm
MMPKMANRDRSPLSSSKSSSKAGLYGKIERSDKRE

SEQ ID NO: 4875 - DNA, 111 bp, Streptococcus pneumoniae
atgaaaatcaaagatcaaactaggaaactagctacgggctgctcaaaacactgttttgaggttgcagatagaactgacgaagtcagtaacatctatacggcaaggcgacgt

SEQ ID NO: 4876 - protein, 37 aa, Streptococcus pneumoniae
  box element
MKIKDQTRKLATGCSKHCFEVADRTDEVSNIYTARRR

SEQ ID NO: 4877 - DNA, 537 bp, Streptococcus pneumoniae
atgaagttattgtctatcgcaatttctagctataatgcagcagcctatcttcattactgtgtggagtcgctagtgattggtggtgagcaagttgggattttgattatcaatgacgggtctcaggatcagactcaggaaatcgctgagtgtttagctagcaagtatcctaatatcgttagagccatctatcaggaaaataaatgccatggcggtgcggtcaatcgtggcttggtagaggcttctgggcgctattttaaagtagttgacagtgatgactgggtggatcctcgtgcctacttgaaaattcttgaaaccttgcaggaacttgagagcaaaggtcaagaggtggatgtctttgtgaccaattttgtctatgaaaaggaagggcagtctcgtaagaagagtatgagttacgattcagtcttgcctgttcggcagatttttggctgggaccaggtcggaaatttctccaaaggccagtataccatgatgcactcgctgatttatcggacagatttgttgcgtgctagccagttc

SEQ ID NO: 4878 - protein, 179 aa, Streptococcus pneumoniae
  glycosyl transferase, family 2 POINT MUTATION
MKLLSIAISSYNAAAYLHYCVESLVIGGEQVGILIINDGSQDQTQEIAECLASKYPNIVRAIYQENKCHGGAVNRGLVEASGRYFKVVDSDDWVDPRAYLKILETLQELESKGQEVDVFVTNFVYEKEGQSRKKSMSYDSVLPVRQIFGWDQVGNFSKGQYTMMHSLIYRTDLLRASQF

SEQ ID NO: 4879 - DNA, 408 bp, Streptococcus pneumoniae
atgtactatctgcctgtcgatttctatcgttatttgattgggcgtgaggaccagtctgtcaatgagcaagtgatgattaagtgcattgaccagcaactcaaggtcaatcgactcttgatagaccaacttgatttgtcccaagtgagtcatcccaaaatgcgagaatatctgctgaatcatattgaactcacgacggtgatttccagtaccctgctcaaccgatctggaacagcggagcatctggcaaaaaaacgccaattgtggacctatattcagcagaaaaatccagaagtctttcaggctattcgtaagaccatgttgagccgtttgaccaaacattctgtcttgccagatcgcaaactgtccaatgtcgtctatcaaatcaccaaatctgtttatggatttaat

SEQ ID NO: 4880 - protein, 136 aa, Streptococcus pneumoniae
  hypothetical protein
MYYLPVDFYRYLIGREDQSVNEQVMIKCIDQQLKVNRLLIDQLDLSQVSHPKMREYLLNHIELTTVISSTLLNRSGTAEHLAKKRQLWTYIQQKNPEVFQAIRKTMLSRLTKHSVLPDRKLSNVVYQITKSVYGFN

SEQ ID NO: 4881 - DNA, 567 bp, Streptococcus pneumoniae
ttgatagacgacattggacagtttgcgatctggcaagacagaatgtttggtcaaacggctcaacatggtcttacgaatagcctgaaagacttctggatttttctgctgaatataggtccacaattggcgtttttttgccagatgctccgctgttccagatcggttgagcagggtactggaaatcaccgtcgtgagttcaatatgattcagcagatattctcgcattttgggatgactcacttgggacaaatcaagttggtctatcaagagtcgattgaccttgagttgctggtcaatgcacttaatcatcacttgctcattgacagactggtcctcacgcccaatcaaataacgatagaaatcgacaggcagatagtacatggtcttgacctgctgaaggggcgtaaagacaaagagattatcgacataaaaagtatgttcaggcagttagaactggctagcacgcaacaaatctgtccgataaatcagcgagtgcatcatggtatactggcctttggagaaatttccgacctggtcccagccaaaaatctgccgaacaggcaagac

SEQ ID NO: 4882 - protein, 189 aa, Streptococcus pneumoniae
  hypothetical protein
MIDDIGQFAIWQDRMFGQTAQHGLTNSLKDFWIFLLNIGPQLAFFCQMLRCSRSVEQGTGNHRREFNMIQQIFSHFGMTHLGQIKLVYQESIDLELLVNALNHHLLIDRLVLTPNQITIEIDRQIVHGLDLLKGRKDKEIIDIKSMFRQLELASTQQICPINQRVHHGILAFGEISDLVPAKNLPNRQD

SEQ ID NO: 4883 - DNA, 2571 bp, Streptococcus pneumoniae
atgaaattcaatccaaatcaaagatatactcgttggtctattcgccgtctcagtgtcggtgttgcctcagttgttgtggctagtggcttctttgtcctagttggtcagccaagttctgtacgtgccgatgggctcaatccaaccccaggtcaagtcttacctgaagagacatcgggaacgaaagagggtgacttatcagaaaaaccaggagacaccgttctcactcaagcgaaacctgagggcgttactggaaatacgaattcacttccgacacctacagaaagaactgaagtgagcgaggaaacaagcccttctagtctggatacactttttgaaaaagatgaagaagctcaaaaaaatccagagctaacagatgtcttaaaagaaactgtagatacagctgatgtggatgggacacaagcaagtccagcagaaactactcctgaacaagtaaaaggtggagtgaaagaaaatacaaaagacagcatcgatgttcctgctgcttatcttgaaaaagctgaagggaaaggtcctttcactgccggtgtaaaccaagtaattccttatgaactattcgctggtgatggtatgttaactcgtctattactaaaagcttcggataatgctccttggtctgacaatggtactgctaaaaatcctgctttacctcctcttgaaggattaacaaaagggaaatacttctatgaagtagacttaaatggcaatactgttggtaaacaaggtcaagctttaattgatcaacttcgcgctaatggtactcaaacttataaagctactgttaaagtttacggaaataaagacggtaaagctgacttgactaatctagttgctactaaaaatgtagacatcaacatcaatggattagttgctaaagaaacagttcaaaaagccgttgcagacaacgttaaagacagtatcgatgttccagcagcctacctagaaaaagccaagggtgaaggtccattcacagcaggtgtcaaccatgtgattccatacgaactcttcgcaggtgatggcatgttgactcgtctcttgctcaaggcatctgacaaggcaccatggtcagataacggcgacgctaaaaacccagccctatctccactaggcgaaaacgtgaagaccaaaggtcaatacttctatcaagtagccttggacggaaatgtagctggcaaagaaaaacaagcgctcattgaccagttccgagcaaatggtactcaaacttacagcgctacagtcaatgtctatggtaacaaagacggtaaaccagacttggacaacatcgtagcaactaaaaaagtcactattaacataaacggtttaatttctaaagaaacagttcaaaaagccgttgcagacaacgttaaagacagtatcgatgttccagcagcctacctagaaaaagccaagggtgaaggtccattcacagcaggtgtcaaccatgtgattccatacgaactcttcgcaggtgatggtatgttgactcgtctcttgctcaaggcatctgacaaggcaccatggtcagataacggtgacgctaaaaacccagccctatctccactaggtgaaaacgtgaagaccaaaggtcaatacttctatcaattagccttggacggaaatgtagctggcaaagaaaaacaagcgctcattgaccagttccgagcaaacggtactcaaacttacagcgctacagtcaatgtctatggtaacaaagacggtaaaccagacttggacaacatcgtagcaactaaaaaagtcactattaacataaacggtttaatttctaaagaaacagttcaaaaagccgttgcagacaacgttaaggacagtatcgatgttccagcagcctacctagaaaaggccaagggtgaaggtccattcacagcaggtgtcaaccatgtgattccatacgaactcttcgcaggtgatggcatgttgactcgtctcttgctcaaggcatctgacaaggcaccatggtcagataacggcgacgctaaaaacccagctctatctccactaggtgaaaacgtgaagaccaaaggtcaatacttctatcaagtagccttggacggaaatgtagctggcaaagaaaaacaagcgctcattgaccagttccgagcaaacggtactcaaacttacagcgctacagtcaatgtctatggtaacaaagacggtaaaccagacttggacaacatcgtagcaactaaaaaagtcactattaagataaatgttaaagaaacatcagacacagcaaatggttcattatcaccttctaactctggttctggcgtgactccgatgaatcacaatcatgctacaggtactacagatagcatgcctgctgacaccatgacaagttctaccaacacgatggcaggtgaaaacatggctgcttctgctaacaagatgtctgatacgatgatgtcagaggataaagctatgctaccaaatactggtgagactcaaacatcaatggcaagtattggtttccttgggcttgcgcttgcaggtttactcggtggtctaggtttgaaaaacaaaaaagaagaaaac

SEQ ID NO: 4884 - protein, 857 aa, Streptococcus pneumoniae
  cell wall surface anchor family protein; Cellular location: Peptidoglycan-bound (LPXTG); Similar to strain R6 sequence 15902119 (0.E+01)
MKFNPNQRYTRWSIRRLSVGVASVVVASGFFVLVGQPSSVRADGLNPTPGQVLPEETSGTKEGDLSEKPGDTVLTQAKPEGVTGNTNSLPTPTERTEVSEETSPSSLDTLFEKDEEAQKNPELTDVLKETVDTADVDGTQASPAETTPEQVKGGVKENTKDSIDVPAAYLEKAEGKGPFTAGVNQVIPYELFAGDGMLTRLLLKASDNAPWSDNGTAKNPALPPLEGLTKGKYFYEVDLNGNTVGKQGQALIDQLRANGTQTYKATVKVYGNKDGKADLTNLVATKNVDININGLVAKETVQKAVADNVKDSIDVPAAYLEKAKGEGPFTAGVNHVIPYELFAGDGMLTRLLLKASDKAPWSDNGDAKNPALSPLGENVKTKGQYFYQVALDGNVAGKEKQALIDQFRANGTQTYSATVNVYGNKDGKPDLDNIVATKKVTININGLISKETVQKAVADNVKDSIDVPAAYLEKAKGEGPFTAGVNHVIPYELFAGDGMLTRLLLKASDKAPWSDNGDAKNPALSPLGENVKTKGQYFYQLALDGNVAGKEKQALIDQFRANGTQTYSATVNVYGNKDGKPDLDNIVATKKVTININGLISKETVQKAVADNVKDSIDVPAAYLEKAKGEGPFTAGVNHVIPYELFAGDGMLTRLLLKASDKAPWSDNGDAKNPALSPLGENVKTKGQYFYQVALDGNVAGKEKQALIDQFRANGTQTYSATVNVYGNKDGKPDLDNIVATKKVTIKINVKETSDTANGSLSPSNSGSGVTPMNHNHATGTTDSMPADTMTSSTNTMAGENMAASANKMSDTMMSEDKAMLPNTGETQTSMASIGFLGLALAGLLGGLGLKNKKEEN

SEQ ID NO: 4885 - DNA, 696 bp, Streptococcus pneumoniae
atgggaaagacaattttactcgttgacgacgaggtagaaatcacagatattcatcagagatacttaattcaggcaggttatcaggtcttggtagcccatgatggactggaagcgctagagctgttcaagaaaaaaccgattgatttgattatcacagatgtcatgatgcctcggatggatggttatgatttaatcagtgaggttcaatacttatcaccagagcagcctttcctatttattactgctaagaccagtgaacaggacaagatttacggcctgagcttgggagcagatgattttattgctaagccttttagcccacgtgagctggttttgcgtgtccacaatattttgcgccgccttcatcgtgggggcgaaacagagctgatttcccttggcaatctaaaaatgaatcatagtagtcatgaagttcaaataggagaagaaatgctggatttaactgttaaatcatttgaattgctgtggattttagctagtaatccagagcgagttttctccaagacagacctctatgaaaagatctggaaagaagactacgtggatgacaccaataccttgaatgtgcatatccatgctcttcgacaggagctggcaaaatatagtagtgaccaaactcccactattaagacagtttgggggttgggatataagatagagaaaccgagaggacaaaca

SEQ ID NO: 4886 - protein, 232 aa, Streptococcus pneumoniae
  DNA-binding response regulator; Cellular location: cytoplasm; Similar to strain R6 sequence 15902120 (e-130)
MGKTILLVDDEVEITDIHQRYLIQAGYQVLVAHDGLEALELFKKKPIDLIITDVMMPRMDGYDLISEVQYLSPEQPFLFITAKTSEQDKIYGLSLGADDFIAKPFSPRELVLRVHNILRRLHRGGETELISLGNLKMNHSSHEVQIGEEMLDLTVKSFELLWILASNPERVFSKTDLYEKIWKEDYVDDTNTLNVHIHALRQELAKYSSDQTPTIKTVWGLGYKIEKPRGQT

SEQ ID NO: 4887 - DNA, 1050 bp, Streptococcus pneumoniae
atgaaactaaaaagttatattttggttggatatattatttcaaccctcttaaccattttggttgttttttgggctgttcaaaaaatgctgattgcgaaaggcgagatttactttttgcttgggatgaccatcgttgccagccttgtcggtgctgggattagtctctttctcctattgccagtctttacgtcgttgggcaaactcaaggagcatgccaagcgggtagcggccaaggattttccttcaaatttggaggttcaaggtcctgtagaatttcagcaattagggcaaacttttaatgagatgtcccatgatttgcaggtaagctttgattccttggaagaaagcgaacgagaaaagggcttgatgattgcccagttgtcgcatgatattaagactcctatcacttcgatccaagcgacggtagaagggattttggatgggattatcaaggagtcggagcaagctcattatctagcaaccattggacgccagacggagaggctcaataaactggttgaggagttgaattttttgaccctaaacacagctagaaatcaggtggaaactaccagtaaagacagtatttttctggacaagctcttaattgagtgcatgagtgaatttcagtttttgattgagcaggagagaagagatgtccacttgcaggtaatcccagagtctgcccggattgagggagattatgctaagctttctcgtatcttggtgaatctggtcgataacgcttttaaatattctgctccaggaaccaagctggaagtggtggctaagctggagaaggaccagctttcaatcagtgtgaccgatgaagggcagggtattgccccagaggatttggaaaatattttcaaacgcctttatcgtgtcgaaacttcgcgtaacatgaagacaggtggtcatggattaggacttgcgattgcgcgtgaattggcccatcaattgggtggggaaatcacagtcagcagccagtacggtctaggaagtacctttaccctcgttctcaacctctctggtagtgaaaataaagcc

SEQ ID NO: 4888 - protein, 350 aa, Streptococcus pneumoniae
  sensor histidine kinase; Cellular location: membrane; Similar to strain R6 sequence 15902121 (0.E+01)
MKLKSYILVGYIISTLLTILVVFWAVQKMLIAKGEIYFLLGMTIVASLVGAGISLFLLLPVFTSLGKLKEHAKRVAAKDFPSNLEVQGPVEFQQLGQTFNEMSHDLQVSFDSLEESEREKGLMIAQLSHDIKTPITSIQATVEGILDGIIKESEQAHYLATIGRQTERLNKLVEELNFLTLNTARNQVETTSKDSIFLDKLLIECMSEFQFLIEQERRDVHLQVIPESARIEGDYAKLSRILVNLVDNAFKYSAPGTKLEVVAKLEKDQLSISVTDEGQGIAPEDLENIFKRLYRVETSRNMKTGGHGLGLAIARELAHQLGGEITVSSQYGLGSTFTLVLNLSGSENKA

SEQ ID NO: 4889 - DNA, 609 bp, Streptococcus pneumoniae
atgtcacgttatacaggaccatcttggaaacaagctcgtcgtcttggcctttcacttacaggtacaggtaaagaattggcacgtcgtaactacgtaccaggacaacacggaccaaacaaccgttctaaattgtcagaatacggtttgcaattggctgaaaaacaaaaacttcgtttcacttacggtgtaggtgaaaaacaattccgtaacttgttcgtacaagctacaaaaatcaaaggcggaatcctaggtttcaactttatgcttcttttggaacgtcgtttggataacgttgtttaccgtcttggtctcgcgactactcgtcgtcaagctcgtcaattcgtaaaccacggtcacatccttgttgacgggaaacgcgttgatatcccatcataccgcgtaactccaggtcaagtgatctcagttcgtgaaaaatcattgaaagttccagcaatccttgaagcagtagaagctactcttggacgtccagcattcgtatcattcgacgctgaaaaattggaaggttcattgactcgcttgccagaacgcgacgaaatcaacccagaaatcaacgaagcacttgtcgttgaattctacaacaaaatgttg

SEQ ID NO: 4890 - protein, 203 aa, Streptococcus pneumoniae
  ribosomal protein S4 (rpsD); Cellular location: cytoplasm; Similar to strain R6 sequence 15902122 (e-114)
MSRYTGPSWKQARRLGLSLTGTGKELARRNYVPGQHGPNNRSKLSEYGLQLAEKQKLRFTYGVGEKQFRNLFVQATKIKGGILGFNFMLLLERRLDNVVYRLGLATTRRQARQFVNHGHILVDGKRVDIPSYRVTPGQVISVREKSLKVPAILEAVEATLGRPAFVSFDAEKLEGSLTRLPERDEINPEINEALVVEFYNKML

SEQ ID NO: 4891 - DNA, 138 bp, Streptococcus pneumoniae
atgaaatcaactaaagaagaaatccaaaccatcaaaacacttttaaaagactctcgtacagctaaatatcataaacgccttcaaatcgttctattttgtctgatgggcaaatcttataaagagattatagaactttta

SEQ ID NO: 4892 - protein, 46 aa, Streptococcus pneumoniae
  hypothetical protein; Cellular location: cytoplasm
MKSTKEEIQTIKTLLKDSRTAKYHKRLQIVLFCLMGKSYKEIIELL

SEQ ID NO: 4893 - DNA, 267 bp, Streptococcus pneumoniae
ttgagatcattgacaggtgtatcgaatcctaccacagattcagcacgtctggttttggcagaggctaataaagcttttgcagatgatagtttgacagagcaaggtttacgtgatatcttgcaaacagtcaaagatgccattgcttccctagagtccattaaggaaagccagtcagcaactaaggatggaggacaaacagcgggcaaagaaacagcaggagaagatgagtctgcaaatcaaactcaagaaattagccaaggaattaag

SEQ ID NO: 4894 - protein, 89 aa, Streptococcus pneumoniae
  hypothetical protein; Cellular location: cytoplasm; Similar to strain R6 sequence 15902124 (1.E-44)
MRSLTGVSNPTTDSARLVLAEANKAFADDSLTEQGLRDILQTVKDAIASLESIKESQSATKDGGQTAGKETAGEDESANQTQEISQGIK

SEQ ID NO: 4895 - DNA, 93 bp, Streptococcus pneumoniae
ttgttcttggcagatgaaaaaggctctgagcatactgcagcagagttgattgataatcttaaagaggttattgctaagttgaaagcaaacgcc

SEQ ID NO: 4896 - protein, 31 aa, Streptococcus pneumoniae
  hypothetical protein; Cellular location: cytoplasm
MFLADEKGSEHTAAELIDNLKEVIAKLKANA

SEQ ID NO: 4897 - DNA, 957 bp, Streptococcus pneumoniae
atggatatcaaaataaaaagggaggaaattatgaaaaagttttcaaaaacattgagagacaactggatctttctcttgatggttttgccaggggcactctggttgattctattcttttacattccagtatttgggaacgtggttgccttcaaagactaccacatgaccagtaatggtttcatagatagtatcataaatagtaaatgggtcggactcgataattttagattcttatttagttcaagagacgcctttattatcacacgaaatactgtcctctacaatcttggctttatctttctaggtttagttgtatctgtagggattgccattatcctcagcgagctccgttctaagagaatggtgaagatttttcaaacttctatgttgttcccttacttcttgtcttgggttatcatcagtttctttacagatgccttcctaaatattgataaaggggtgttcaatcatctattggaaagtcttggtctcaaagaagtcaatttctacgctgacctgggcatctggccctatctcctacttttcctaggtatttggaaaggctttggatatagcagtgtcatgtactatgcgacgatcatgggaattgatccaacctactacgaagcagcgacagtggacggagctagcaagtggcaacgtattcgcaacgtaaccattcctcagttgactccgcttgtaactgtattgaccatccttgcagtcggaaatatcttccgcgcagacttcggtctcttctatcaaatcccacacaatgctggtcagctttacaatgtaaccaacgttttggacgtatatgtctttaatggtttgactcagacagcagatatcggtatggctgcagcagccggtctttaccaatccgttgttggtttgattctggttatcctatcaaacttgcttgcaagacgagtcgatccaaactcagctttgttc

SEQ ID NO: 4898 - protein, 319 aa, Streptococcus pneumoniae
  ABC transporter, permease protein; Cellular location: membrane; Similar to strain R6 sequence 15902125 (0.E+01)
MDIKIKREEIMKKFSKTLRDNWIFLLMVLPGALWLILFFYIPVFGNVVAFKDYHMTSNGFIDSIINSKWVGLDNFRFLFSSRDAFIITRNTVLYNLGFIFLGLVVSVGIAIILSELRSKRMVKIFQTSMLFPYFLSWVIISFFTDAFLNIDKGVFNHLLESLGLKEVNFYADLGIWPYLLLFLGIWKGFGYSSVMYYATIMGIDPTYYEAATVDGASKWQRIRNVTIPQLTPLVTVLTILAVGNIFRADFGLFYQIPHNAGQLYNVTNVLDVYVFNGLTQTADIGMAAAAGLYQSVVGLILVILSNLLARRVDPNSALF

SEQ ID NO: 4899 - DNA, 972 bp, Streptococcus pneumoniae
ttgcaagacgagtcgatccaaactcagctttgttctagaaaggaggagaatatggcaaaaaagaaaattaaaaaagaaaaaattgataatgtcggcattcactccttcagtaagaaagcagatatcttcttcagtatcatttcgggtttgattgccctctcttgtatcctaccttttgtattcgttatcattatttcagtgacagacgagaaaagcctcctccaatacggctatagcttcttcccatcccaatttggcttagacggttttgagtttttggcacagtttaaggataaaatcctacaagccctcttcatctctgtctttgtaaccgtagttgggacattgacaaatgtctttatcacaacaacctatgcctacgctatttcacggacaacctttaagtatcgcagattctttaccatcttcgtccttctcagtatgttgttcaacgctggtttggtaccaggttatatcatggtgacccgtgtacttcagcttggtgacactgtttgggccttgattgttccaatgcttctctcaccatttaacatcatcttgatgcgttccttcttcaagaagaccattccagaagccattctagaatcggctcgtatcgatggtgccagtgaggcccggattttcttccaaatctgtttgccattgtcactaccaggtatcgcaaccatcacgctcttaacagctcttggtttctggaatgactggttcaacgcccttctttacatcaagagtgacaacttgtatccattgcaatatttgctcatgcaaatccaacaaaatatggactacattgccaaagcggtcggcttgattggtcaactgggagttgctctaccgaaagaaacaggtcgtatggccatggttgtggttgcaacccttccaatcgcgattttgtatccatttttccaacgctactttgtaaaaggtttgactatcggtggtgtgaaagaa

SEQ ID NO: 4900 - protein, 324 aa, Streptococcus pneumoniae
  ABC transporter, permease protein; Cellular location: membrane; Similar to strain R6 sequence 15902126 (e-172)
MQDESIQTQLCSRKEENMAKKKIKKEKIDNVGIHSFSKKADIFFSIISGLIALSCILPFVFVIIISVTDEKSLLQYGYSFFPSQFGLDGFEFLAQFKDKILQALFISVFVTVVGTLTNVFITTTYAYAISRTTFKYRRFFTIFVLLSMLFNAGLVPGYIMVTRVLQLGDTVWALIVPMLLSPFNIILMRSFFKKTIPEAILESARIDGASEARIFFQICLPLSLPGIATITLLTALGFWNDWFNALLYIKSDNLYPLQYLLMQIQQNMDYIAKAVGLIGQLGVALPKETGRMAMVVVATLPIAILYPFFQRYFVKGLTIGGVKE

SEQ ID NO: 4901 - DNA, 1473 bp, Streptococcus pneumoniae
atgaaaaactggaaaaaatatgcttttgcatctgctagtgtagtcgctctggctgcaggtcttgctgcttgtggaaatttgacaggtaacagcaaaaaagctgctgattcaggtgacaaacctgttatcaaaatgtaccaaatcggtgacaaaccagacaacttggatgaattgttagcaaatgccaacaaaatcattgaagaaaaagttggtgccaaattggatatccaataccttggctggggtgactatggtaagaaaatgtcagttatcacatcatctggtgaaaactatgatattgcctttgcagataactatattgtaaatgctcaaaaaggtgcttacgctgacttgacagaattgtacaaaaaagaaggtaaagacctttacaaagcacttgacccagcttacatcaagggtaatactgtaaatggtaagatttacgctgttccagttgcagccaacgttgcatcatctcaaaactttgccttcaacggaactctccttgctaaatatggtatcgatatttcaggtgttacttcttacgaaactcttgagccagtcttgaaacaaatcaaagaaaaagctccagacgtagtaccatttgctattggtaaagttttcatcccatctgataattttgactacccagtagcaaacggtcttccattcgttatcgaccttgaaggcgatactactaaagttgtaaaccgttacgaagtgcctcgtttcaaagaacacttgaagactcttcacaaattctatgaagctggctacattccaaaagacgtcgcaacaagcgatacttcctttgaccttcaacaagatacttggttcgttcgtgaagaaacagtaggaccagctgactacggtaacagcttgctttcacgtgttgccaacaaagatatccaaatcaaaccaattactaacttcatcaagaaaaaccaaacaacacaagttgctaactttgtcatctcaaacaactctaagaacaaagaaaaatcaatggaaatcttgaacctcttgaatacgaacccagaactcttgaacggtcttgtttacggtccagaaggcaagaactgggaaaaaattgaaggtaaagaaaaccgtgttcgcgttcttgatggctacaaaggaaacactcacatgggtggatggaacactggtaacaactggatcctttacatcaacgaaaacgttacagaccaacaaatcgaaaattctaagaaagaattggcagaagctaaagaatctccagcgcttggatttatcttcaatactgacaatgtgaaatctgaaatctcagctattgctaacacaatgcaacaatttgatacagctatcaacactggtactgtagacccagataaagcgattccagaattgatggaaaaattgaaatctgaaggtgcctacgaaaaagtattgaacgaaatgcaaaaacaatacgatgaattcttgaaaaacaaaaaa

SEQ ID NO: 4902 - protein, 491 aa, Streptococcus pneumoniae
  ABC transporter, substrate-binding protein; Cellular location: lipoprotein; Similar to strain R6 sequence 15902127 (0.E+01)
MKNWKKYAFASASVVALAAGLAACGNLTGNSKKAADSGDKPVIKMYQIGDKPDNLDELLANANKIIEEKVGAKLDIQYLGWGDYGKKMSVITSSGENYDIAFADNYIVNAQKGAYADLTELYKKEGKDLYKALDPAYIKGNTVNGKIYAVPVAANVASSQNFAFNGTLLAKYGIDISGVTSYETLEPVLKQIKEKAPDVVPFAIGKVFIPSDNFDYPVANGLPFVIDLEGDTTKVVNRYEVPRFKEHLKTLHKFYEAGYIPKDVATSDTSFDLQQDTWFVREETVGPADYGNSLLSRVANKDIQIKPITNFIKKNQTTQVANFVISNNSKNKEKSMEILNLLNTNPELLNGLVYGPEGKNWEKIEGKENRVRVLDGYKGNTHMGGWNTGNNWILYINENVTDQQIENSKKELAEAKESPALGFIFNTDNVKSEISAIANTMQQFDTAINTGTVDPDKAIPELMEKLKSEGAYEKVLNEMQKQYDEFLKNKK

SEQ ID NO: 4903 - DNA, 111 bp, Streptococcus pneumoniae
atggttaaaataaggacaagagaaaacatggatatctatatccttgtgccaaaaaaaccactgccctccccagaccaacctgaggaaagcagtgattcttattttaggagt

SEQ ID NO: 4904 - protein, 37 aa, Streptococcus pneumoniae
  hypothetical protein; Cellular location: cytoplasm
MVKIRTRENMDIYILVPKKPLPSPDQPEESSDSYFRS

SEQ ID NO: 4905 - DNA, 105 bp, Streptococcus pneumoniae
atgttttctcttgtccttattttaaccattcaagaaatttcgagaaccctctacaatttccagtcaaataaattgcattcgttttctcaagcaggtatactagtg

SEQ ID NO: 4906 - protein, 35 aa, Streptococcus pneumoniae
  hypothetical protein
MFSLVLILTIQEISRTLYNFQSNKLHSFSQAGILV

SEQ ID NO: 4907 - DNA, 984 bp, Streptococcus pneumoniae
atggcaaaagatattcgtgtcttactttactacctttatactccaattgaaaatgcagagcaatttgctgcagaccacttggctttctgtaaatcaatcggccttaaaggccgtatcctagtcgctgacgagggaattaacggaacagtttcaggtgactatgaaacaactcaaaaatacatggactacgttcacagccttccaggaatggaagaactctggttcaagattgacgaagaaaatgaacaagccttcaagaagatgtttgttcgctacaagaaagaaattgtccaccttggtttggaagacaacgactttgacaatgacatcaacccacttgaaacaacaggtgcttacttgtctccaaaagagttcaaagaagcgcttcttgataaagataccgttgtccttgacacacgtaacgattatgagtacgacctaggacatttccgtggagctattcgcccagatattcgcaacttccgtgagttaccacaatgggtccgtgataacaaggaaaaattcatggacaagcgtgtcgtggtttactgtacaggtggcgttcgctgtgagaaattctcaggctggatggtccgtgaaggctacaaagatgtcggccaattgcacggaggaatcgcaacttacggtaaagacccagaagttcaaggtgagctttgggatgggaaaatgtacgtctttgacgagcgtattgccgttgatgtcaaccatgtcaacccaactatcgtagggaaagactggtttgatggaacaccatgtgaacgttatgtcaactgtggaaatccattctgtaaccgtcgtatcttgacatcagaagaaaatgaagacaagtaccttcgtggatgctcacacgagtgccgtgttcacccacgtaaccgctatgtttcaaaaaatgaattgacacaagctgaagttatcgagcgcctagccgctatcggtgaaagcttggatcaagcagctactgta

SEQ ID NO: 4908 - protein, 328 aa, Streptococcus pneumoniae
  conserved hypothetical protein; Cellular location: cytoplasm; Similar to strain R6 sequence 15902128 (0.E+01)
MAKDIRVLLYYLYTPIENAEQFAADHLAFCKSIGLKGRILVADEGINGTVSGDYETTQKYMDYVHSLPGMEELWFKIDEENEQAFKKMFVRYKKEIVHLGLEDNDFDNDINPLETTGAYLSPKEFKEALLDKDTVVLDTRNDYEYDLGHFRGAIRPDIRNFRELPQWVRDNKEKFMDKRVVVYCTGGVRCEKFSGWMVREGYKDVGQLHGGIATYGKDPEVQGELWDGKMYVFDERIAVDVNHVNPTIVGKDWFDGTPCERYVNCGNPFCNRRILTSEENEDKYLRGCSHECRVHPRNRYVSKNELTQAEVIERLAAIGESLDQAATV

SEQ ID NO: 4909 - DNA, 951 bp, Streptococcus pneumoniae
ttgaagagattttcgaagagtataaagtttgtttttgtatctttcagaaaaataaggtatactgtatgtaaacgatttcaaaggagtccagttatggcgaaaacattttttattccaaataaacagagcattttaggagaacaagagattttgaatgccaagtcgatcttggccttgctagacggtttggagtcacatagctatgatgtagtctatctccgtcagcctcttaatcgtctcgaatatatcgagtgtgcgatagtggggcaatcacaatttctctttaaggtcagttatgctgatggtcaaaaggcttaccgtgtcgatcttcctgacctactaacaaagacagactggcagattatcaagtcatttttagatgctttgcttgcttatacagggactgatattgaagggctagatggttttgattttgaagcttatttccaagcaagtattcaagcctatctagcagaccctgtagctcgttttacgatttgccaaggaatttttaatcctattttctttagtcgtgagaacttgaaaagctttttagaggcagatggcttggctcagtttgaagcgcgtgtgcgtgcggttcaagagacagatgcctactttgcgagagtttccttctatcaggatggagaaggaaaagtgcatggcgtttaccatctagctcaaggagtcaagacagttttaccgagagaaccgtttgttcctgcagcctatattgagcaattggtggataaggaagtccagtgggagattgacttggttcaaatcacaggagatggctctaaaccagaagactatgaagccattgctcgcttggactatgcaaaattcttagaggtattacccccatctttttaccaccaactagacgccaatcaaatagaagtgcaacccatattagacaaagattttaaaacattagcacaagaaaag

SEQ ID NO: 4910 - protein, 317 aa, Streptococcus pneumoniae
  hypothetical protein; Cellular location: cytoplasm; Similar to strain R6 sequence 15902129 (e-163)
MKRFSKSIKFVFVSFRKIRYTVCKRFQRSPVMAKTFFIPNKQSILGEQEILNAKSILALLDGLESHSYDVVYLRQPLNRLEYIECAIVGQSQFLFKVSYADGQKAYRVDLPDLLTKTDWQIIKSFLDALLAYTGTDIEGLDGFDFEAYFQASIQAYLADPVARFTICQGIFNPIFFSRENLKSFLEADGLAQFEARVRAVQETDAYFARVSFYQDGEGKVHGVYHLAQGVKTVLPREPFVPAAYIEQLVDKEVQWEIDLVQITGDGSKPEDYEAIARLDYAKFLEVLPPSFYHQLDANQIEVQPILDKDFKTLAQEK

SEQ ID NO: 4911 - DNA, 1062 bp, Streptococcus pneumoniae
atgaaacaagaatggtttgaaagtaatgattttgtaaaaacaacaagcaagaacaagcctgaagagcaagctcaagaggttgcagacaaggctgaagaaacgatagccgatctcgatacaccaattgaaaaaaatactcagttagaggaggaagtccctcaagctgaagtcgaattggaaagccagcaagaagagaaaattgaagctcctgaagacagtgaagcgagaacagaaatagaagaaaagaaggcatctaattctactgaagaagagccagacctttctaaagaaacagaaaaagtcactatagctgaagagagccaagaagctcttcctcagcaaaaagcaaccacgaaagagccacttcttatcagtaaatctttagaaagtccttatatccccgaccaagctccaaaatctagggataaatggaaagagcaagtgcttgatttttggtcttggctagtggaagcgatcaaatctcctacaagtaagttggaaacaagtatcacacacagttacacagcctttctcttgctcattctgttttctgcatcttcctttttctttagtatctatcacatcaaacatgcttactatggacatatagcaagcattaacagtcgcttccctgagcagctagctcctttaactcttttttctatcatctctatcctagtagcgacaacactcttcttcttttcattcctcttgggtagtttcgttgtgagacgatttatccaccaggaaaaggactggacgctagacaaggttctccaacaatatagtcaactcttggcaattccaatcttcctcactgctattgctagtttctttgctttctttgatagcctacgatttacagccctcttgtgtgtgattagcattggaatcattctgcttgccagtctccatatcattacaagaccaagtcaagcaagtgaaaccgactccttctatcaattattcttgtctgtccttgtgaacggagttattatcctcctcttctttgtagctgaagtggcactgattggagattatcttcgtatcttggcctttctt

SEQ ID NO: 4912 - protein, 354 aa, Streptococcus pneumoniae
  conserved domain protein; Cellular location: membrane; Similar to strain R6 sequence 15902130 (0.E+01)
MKQEWFESNDFVKTTSKNKPEEQAQEVADKAEETIADLDTPIEKNTQLEEEVPQAEVELESQQEEKIEAPEDSEARTEIEEKKASNSTEEEPDLSKETEKVTIAEESQEALPQQKATTKEPLLISKSLESPYIPDQAPKSRDKWKEQVLDFWSWLVEAIKSPTSKLETSITHSYTAFLLLILFSASSFFFSIYHIKHAYYGHIASINSRFPEQLAPLTLFSIISILVATTLFFFSFLLGSFVVRRFIHQEKDWTLDKVLQQYSQLLAIPIFLTAIASFFAFFDSLRFTALLCVISIGIILLASLHIITRPSQASETDSFYQLFLSVLVNGVIILLFFVAEVALIGDYLRILAFL

SEQ ID NO: 4913 - DNA, 909 bp, Streptococcus pneumoniae
atgcgtaaatggacaaaaggatttctcatctttggtgtggtgactaccgttatcggctttatcctgctttttgtaggtatccaatctgacgggattaagagcctactttccatgtccaaagaacctgtctatgatagccgtacggaaaagctaacctttggcaaggaagtcgaaaacctagaaattactctccaccaacacacgctcaccatcacagactctttcgatgatcaaatccacatttcttaccatccatctctttctgctcaccatgatcttatcaccaatcagaacgatagaactctgagtctcactgataagaaactgtctgaaactccgtttctctcttctggaattggtgggattcttcatatcgcaagtagctactctagtcgttttgaagaagttattctccgactaccaaaagggagaactctaaaagggatcaacatctcagccaatcgcggacaaaccaccatcataaatgctagccttgaaaatgcgaccctcaatacaaacagctatatcctccgaattgaaggaagtcgtatcaaaaacagtaaactcacaacgcccaatatcgttaatatctttgatacagttcttacagatagtcagctagagtcaacagagaatcacttccacgctgaaaatatccaagtccatggcaaggttgaactgactgccaaagattatctcagaatcatcctagaccagaaagaaagccaacgaattaactgggacatctcaagcaactatggttctatcttccaattcacaagagaaaagcctgaatcaagaggtacggaattaagcaacccttacaaaactgaaaaaaccgatgtcaaggatcaactcattgcgagatctgatgataatattgatctaatatccacaccaagcagacgt

SEQ ID NO: 4914 - protein, 303 aa, Streptococcus pneumoniae
  hypothetical protein; Cellular location: outside; Similar to strain R6 sequence 15902131 (e-172)
MRKWTKGFLIFGVVTTVIGFILLFVGIQSDGIKSLLSMSKEPVYDSRTEKLTFGKEVENLEITLHQHTLTITDSFDDQIHISYHPSLSAHHDLITNQNDRTLSLTDKKLSETPFLSSGIGGILHIASSYSSRFEEVILRLPKGRTLKGINISANRGQTTIINASLENATLNTNSYILRIEGSRIKNSKLTTPNIVNIFDTVLTDSQLESTENHFHAENIQVHGKVELTAKDYLRIILDQKESQRINWDISSNYGSIFQFTREKPESRGTELSNPYKTEKTDVKDQLIARSDDNIDLISTPSRR

SEQ ID NO: 4915 - DNA, 591 bp, Streptococcus pneumoniae
atgacaagaactgaatacctgactcagctagaactctatctcaagaaactacctgaagctgaccgtatcgaagccatggactatttcagagagctctttgacgatgctggagtcgaaggagaagaagaactcatcgctagtttgggaactcccaaagaagcggcccacgaagttctatccaatcttctcgataaaaaaatcaatgaagcacccgctcaaaaaaataaccgacaaattttacatatcgccttgttagccctccttgcagcacctatcggcattcctctgggaatcgccatcctcgtgaccctgttcgcaattcttgtagccgctttgactgtcattctggctttctttgcagtttccatactgggtatcatcggcggattcctatttttagttgaaagtttcactgtcctcgcccaagccaaatcagcctttatcttgatttttggttctggtttactggctatcggtgcttcttcgctagttttacttggcatttcctatgcaactcgcttcttcggtctactcattgttcgtctggtacaatttgttcttaaaaaaggaaagagaggtaatcagcatgcg

SEQ ID NO: 4916 - protein, 197 aa, Streptococcus pneumoniae
  hypothetical protein; Cellular location: membrane; Similar to strain R6 sequence 15902132 (e-103)
MTRTEYLTQLELYLKKLPEADRIEAMDYFRELFDDAGVEGEEELIASLGTPKEAAHEVLSNLLDKKINEAPAQKNNRQILHIALLALLAAPIGIPLGIAILVTLFAILVAALTVILAFFAVSILGIIGGFLFLVESFTVLAQAKSAFILIFGSGLLAIGASSLVLLGISYATRFFGLLIVRLVQFVLKKGKRGNQHA

SEQ ID NO: 4917 - DNA, 324 bp, Streptococcus pneumoniae
atgtactttccaacatcctctgccttgattgaatttctcatcttggctgtactggagcagggtgattcttatggttatgagattagccaaaccattaagctgatcgctaatatcaaagaatccacactctatcccattctcaaaaaattggaaggcaatagctttctgacaacctattctagagagttccaaggtcgcatgcgcaaatactactccttgacaaacggtggtatagagcagctcttgaccctaaaagatgaatgggcactctatacagacaccatcaatggcatcatagaagggagtatccgccatgacaagaac

SEQ ID NO: 4918 - protein, 108 aa, Streptococcus pneumoniae
  conserved hypothetical protein; Cellular location: membrane; Similar to strain R6 sequence 15902133 (7.E-58)
MYFPTSSALIEFLILAVLEQGDSYGYEISQTIKLIANIKESTLYPILKKLEGNSFLTTYSREFQGRMRKYYSLTNGGIEQLLTLKDEWALYTDTINGIIEGSIRHDKN

SEQ ID NO: 4919 - DNA, 1164 bp, Streptococcus pneumoniae
atgaaaaagcaatcactcttttttgttccaggtattatcctgattggtgtttccttgcgaactccttttactgttttacccattattttgggaaatatttcgcaaggtctggaggtagaagttagttcgcttggtgtcttgaccagcctgcctctccttatgtttaccctcttttcaccattttctacccaactggctcagaaaatcggcttggagcatctcttcacctacagcctcttcttcttgaccatcggctcacttattcgactaatcaatctgcccctgctctatctaggaaccttgatggttggggcaagtgtcgcagtcatcaatgtcctgcttcctagtcttatccaagccaatcaaccaaagaaaattggttttctgaccaccttatatgtaacgtctatggggattgcaacggctctggcttcctatctagctgtgcccattacacaagccagttcttggaaaggacttatccttctcctcacgttactctgtctagcaacttttttggtctggctcccaaatcaccgctataatcatagactagctccacaaaccaaacaaaaaagtcaaataaaggtcatgcgtaataaacaggtttgggcaattattatcttttcaggttttcaatccttgatcttttacaccgtcatgacctggttacctaccatgtctatccatgcaggtctatccagtcacgaagctggcttgctgacttctatcttatctctgattagcattcctttttcaatgaccatcccaagcctgacaaccagtttatctactcgcaaccgtcagctcatgctcactctggtttcactagctggtgtggtcggcatttccatgctctttttcccaatcaataatttcatttactggcttgccatccatctcctcatcggaaccgcaaccagtgccctcttcccttatctcatggtcaacttttcactcaagacaagcgcccctgaaaagacagcccaattgtccggcctatctcaaacaggaggctatatcctagcagcctttgggccaaccctctttggttacagttttgacctgttccactcttgggtaccatctgtagctgccctcttgctcatcgatatcctgatgactgtggccctctttacagtggacagagcggataagatcctt

SEQ ID NO: 4920 - protein, 388 aa, Streptococcus pneumoniae
  conserved hypothetical protein; Cellular location: membrane; Similar to strain R6 sequence 15902134 (0.E+01)
MKKQSLFFVPGIILIGVSLRTPFTVLPIILGNISQGLEVEVSSLGVLTSLPLLMFTLFSPFSTQLAQKIGLEHLFTYSLFFLTIGSLIRLINLPLLYLGTLMVGASVAVINVLLPSLIQANQPKKIGFLTTLYVTSMGIATALASYLAVPITQASSWKGLILLLTLLCLATFLVWLPNHRYNHRLAPQTKQKSQIKVMRNKQVWAIIIFSGFQSLIFYTVMTWLPTMSIHAGLSSHEAGLLTSILSLISIPFSMTIPSLTTSLSTRNRQLMLTLVSLAGVVGISMLFFPINNFIYWLAIHLLIGTATSALFPYLMVNFSLKTSAPEKTAQLSGLSQTGGYILAAFGPTLFGYSFDLFHSWVPSVAALLLIDILMTVALFTVDRADKIL

SEQ ID NO: 4921 - DNA, 1062 bp, Streptococcus pneumoniae
gtgactcaaaatgttgaaagtcttctcgtatccattgtaatcagtgcatacaatgaagaaaaatatctgcctggtctaattgaagacttaaaaaatcaaacctatcctaaagaggatattgaaattctatttataaatgctatgtccacagatgggaccacagctatcattcagcaatttataaaggaagatacagagtttaactcaattagattgtataacaatcctaagaaaaatcaagctagtggttttaacctgggagttaaacattctgtaggggaccttattttaaaaattgatgctcattcaaaagttactgagacttttgtaatgaacaatgtggctattattcaacaaggtgaatttgtctgtggggggcctagaccgacgattgtcgaaggaaaaggaaaatgggcagagaccttgcatcttgttgaggaaaatatgtttggcagtagcattgccaattatcgaaatagttctgaggatagatatgtttcttctatttttcatggaatgtataaacgagaggttttccagaaggttggtttagtaaatgagcaacttggccgaactgaagataatgatattcattatagaattcgagaatatggttataaaatccgctatagcccaagtattctatcttatcagtatattcgaccaacattcaagaaaatgctgcatcaaaagtattcaaatggtttgtggattggcttgacaagtcatgttcagtttaagtgtttatcattatttcactatgttccttgtttatttgttttgagtcttgtgtttagtctagcattgttaccgatcacattcgtattcataactttactattaggtgcctattttctacttttgtcattactcactttgctgactttattaaaacataaaaatggatttctaattgtgatgccctttattttattttccattcactttgcttatggccttgggacgattgtaggtttaattagaggatttaaatggaagaaggagtacaagagaacaataatttatttggataaaataagccaaataaatcaaaatatgcta

SEQ ID NO: 4922 - protein, 354 aa, Streptococcus pneumoniae
  glycosyl transferase; Cellular location: membrane; Similar to strain R6 sequence 15902135 (0.E+01)
MTQNVESLLVSIVISAYNEEKYLPGLIEDLKNQTYPKEDIEILFINAMSTDGTTAIIQQFIKEDTEFNSIRLYNNPKKNQASGFNLGVKHSVGDLILKIDAHSKVTETFVMNNVAIIQQGEFVCGGPRPTIVEGKGKWAETLHLVEENMFGSSIANYRNSSEDRYVSSIFHGMYKREVFQKVGLVNEQLGRTEDNDIHYRIREYGYKIRYSPSILSYQYIRPTFKKMLHQKYSNGLWIGLTSHVQFKCLSLFHYVPCLFVLSLVFSLALLPITFVFITLLLGAYFLLLSLLTLLTLLKHKNGFLIVMPFILFSIHFAYGLGTIVGLIRGFKWKKEYKRTIIYLDKISQINQNML

SEQ ID NO: 4923 - DNA, 1848 bp, Streptococcus pneumoniae
atgaataaaaaactaacagattatgtgattgatctggtggaaattttaaataaacaacaaaagcaggttttctggggaatatttgatattttcagtatggtggtttccatcattgtatcttatattttattttatgggctgattaatccagcacctgttgactacattatctatacgagtttggccttcctgttctatcaattgatgattggtttttgggggttgaacgcgagcattagtcgttacagcaagattacggatttcatgaaaatcttttttggtgtgactgctagcagtgtcttgtcatatagtatctgttatgccttcttgccactcttctccatccgtttcatcattctctttatcttgttgagtaccttcttgattttattgccacggattacttggcagttaatctactccagacgcaaaaaaggtagtggtgatggagaacaccgtcggaccttcttgattggtgccggtgatggtggggctctttttatggatagttaccaacatccaaccagtgaattagaactggtcggtattttggataaggattctaagaaaaagggtcaaaaacttggtggtattcctgttttgggctcttatgacaatctgcctgaattagccaaacgccatcaaatcgagcgtgtcatcgttgcgattccgtcgctggatccgtcagaatatgagcgtatcttgcagatgtgtaataagctgggtgtcaaatgttacaagatgcctaaggttgaaactgttgttcagggccttcaccaagcaggtactggcttccaaaaaattgatattacggaccttttgggtcgtcaggaaatccgtcttgacgaatcgcgtctgggtgcagaactgacaggtaagaccatcttagtcacaggagctggaggttcaatcggttctgaaatctgtcgtcaagttagtcgcttcaatcctgaacgcattgtcttgctcggtcatggggaaaactcaatctaccttgtttatcatgaattgattcgtaagttccaagggattgattatgtacctgtgattgcggacattcaagactatgatcgtttgttgcaagtctttgagcagtacaaacctgctattgtttatcatgcggcagcccacaagcatgttcctatgatggagcgcaatccaaaagaagccttcaaaaacaatatccgtggaacttacaatgttgctaaggctgttgatgaagctaaagtgtctaagatggttatgatttcgacagataaggcagtcaatccaccaaatgttatgggagcaaccaagcgcgtggcggagttgattgtcactggctttaaccaacgtagccaatcaacctactgtgcagttcgttttgggaatgttcttggtagccgtggtagtgtcattccagtctttgaacgtcagattgctgaaggtgggcctgtaacggtgacagacttccgtatgacccgttactttatgaccattccagaagctagccgtctggttatccatgctggtgcttatgccaaagatggggaagtctttatccttgatatgggcaaaccagtcaagatttatgacttggccaagaagatggtgcttctaagtggccacactgaaagtgaaattccaatcgttgaagttggaatccgcccaggtgaaaaactctacgaagaactcttggtatcaaccgaactcgttgataatcaagttatggataagattttcgttggtaaggttaatgtcatgcctttagaatccatcaatcaaaagattggagagttccgcactctcagtggagatgagttgaagcaagctattatcgcctttgctaatcaaacaacccacattgaa

SEQ ID NO: 4924 - protein, 616 aa, Streptococcus pneumoniae
  capsular polysaccharide biosynthesis protein, putative; Cellular location: membrane; Similar to strain R6 sequence 15902136 (0.E+01)
MNKKLTDYVIDLVEILNKQQKQVFWGIFDIFSMVVSIIVSYILFYGLINPAPVDYIIYTSLAFLFYQLMIGFWGLNASISRYSKITDFMKIFFGVTASSVLSYSICYAFLPLFSIRFIILFILLSTFLILLPRITWQLIYSRRKKGSGDGEHRRTFLIGAGDGGALFMDSYQHPTSELELVGILDKDSKKKGQKLGGIPVLGSYDNLPELAKRHQIERVIVAIPSLDPSEYERILQMCNKLGVKCYKMPKVETVVQGLHQAGTGFQKIDITDLLGRQEIRLDESRLGAELTGKTILVTGAGGSIGSEICRQVSRFNPERIVLLGHGENSIYLVYHELIRKFQGIDYVPVIADIQDYDRLLQVFEQYKPAIVYHAAAHKHVPMMERNPKEAFKNNIRGTYNVAKAVDEAKVSKMVMISTDKAVNPPNVMGATKRVAELIVTGFNQRSQSTYCAVRFGNVLGSRGSVIPVFERQIAEGGPVTVTDFRMTRYFMTIPEASRLVIHAGAYAKDGEVFILDMGKPVKIYDLAKKMVLLSGHTESEIPIVEVGIRPGEKLYEELLVSTELVDNQVMDKIFVGKVNVMPLESINQKIGEFRTLSGDELKQAIIAFANQTTHIE

SEQ ID NO: 4925 - DNA, 300 bp, Streptococcus pneumoniae; identical to SEQ ID NO: 1

SEQ ID NO: 4926 - protein, 100 aa, Streptococcus pneumoniae; identical to SEQ ID NO: 2
  box element

SEQ ID NO: 4927 - DNA, 630 bp, Streptococcus pneumoniae; identical to SEQ ID NO: 3

SEQ ID NO: 4928 - protein, 210 aa, Streptococcus pneumoniae; identical to SEQ ID NO: 4
  hydrolase, haloacid dehalogenase-like family; Cellular location: cytoplasm; Similar to strain R6 sequence 15902137 (e-119)

SEQ ID NO: 4929 - DNA, 450 bp, Streptococcus pneumoniae
ttggatttcctctttgctgctggtgcctttggactagtcatcgcaaacaatgcctccatctcaggtgctgagggtgggtgtcaagctgaagttggttcagcctctgctatgagtgctgccgccttgactctggctgcaggtggaacaccttatcaggccagtcaagctattgcctttgtcattaaaaatatgctaggcctcatctgtgaccctgttgcaggtttggtcgaagttccctgtgtcaaacgtaatgccatgggagctagctttgctttcatcgcagcagacatggccttggcaggtatcgaatctaaaatccctgtggatgaagtgatcgatgccatgtaccaagtaggagcaagcatgccaactgcctttcgtgaaacagctgaaggtggactcgctaccacccctactggtcgtcgcctccaaaaagaaattttcggagaa

SEQ ID NO: 4930 - protein, 150 aa, Streptococcus pneumoniae
  L-serine dehydratase, iron-sulfur-dependent, alpha subunit, END OVERLAP; Cellular location: membrane; Similar to strain R6 sequence 15902138 (e-161)
MDFLFAAGAFGLVIANNASISGAEGGCQAEVGSASAMSAAALTLAAGGTPYQASQAIAFVIKNMLGLICDPVAGLVEVPCVKRNAMGASFAFIAADMALAGIESKIPVDEVIDAMYQVGASMPTAFRETAEGGLATTPTGRRLQKEIFGE

SEQ ID NO: 4931 - DNA, 141 bp, Streptococcus pneumoniae
atccgtcggagccaatgggttgaagtaactcttgttcaaagtggttttacgatttcaagaactcctctcagttctgaggacacggtaatgattgatgcgacggaagtacaaatcaatcgccctaaaaaaagaattagcgaa

SEQ ID NO: 4932 - protein, 47 aa, Streptococcus pneumoniae
  IS1381, transposase OrfA, truncation FRAMESHIFT; Cellular location: cytoplasm; Similar to strain R6 sequence 15903933 (2.E-86)
IRRSQWVEVTLVQSGFTISRTPLSSEDTVMIDATEVQINRPKKRISE

SEQ ID NO: 4933 - DNA, 831 bp, Streptococcus pneumoniae
atgtctaattcatttgtcaagttgttagtctctcaattatttgcaaatttagcagatattttctttagagtaacaatcattgctaacatatacattatttcaaaatcagtaattgccacatcactagttcctatcttaataggaatatcctcttttgttgcgagtcttttagttccgttggttactaaaaggttagcgctaaatagggttttatctttatctcaatttggaaagactatattattggcgatactggtaggaatgtttaccgtaatgcaatccgtagcgcctttggtgacctatctatttgttgttgcaatttccatactagatggttttgcagcacccgtttcctatgctattgtgccacgctatgcgaccgatttgggtaaggctaattcagccttatcaatgactggtgaagctgttcaattgataggttggggattaggtggactcttgtttgcaacaattggtctgttacctaccacgtgtatcaatttagtcttgtatatcatttctagctttctgatgttatttcttcctaacgctgaagtggaggtgttagagtcagaaactaatcttgaaattttgctcaaaggttggaagttagttgctagaaatcctagattaagactttttgtatcagcaaatttattggaaattttttcaaatacgatttgggtttcttccattatacttgtttttgtaacggagttattaaataaaacggaaagttactggggatattctaatacagcatactctattggtattataattagtggcttaattgcttttaggctatctgaaaagttccttgctgctaaa

SEQ ID NO: 4934 - protein, 277 aa, Streptococcus pneumoniae
  conserved hypothetical protein, interruption; Cellular location: membrane; Similar to strain R6 sequence 15904027 (e-113)
MSNSFVKLLVSQLFANLADIFFRVTIIANIYIISKSVIATSLVPILIGISSFVASLLVPLVTKRLALNRVLSLSQFGKTILLAILVGMFTVMQSVAPLVTYLFVVAISILDGFAAPVSYAIVPRYATDLGKANSALSMTGEAVQLIGWGLGGLLFATIGLLPTTCINLVLYIISSFLMLFLPNAEVEVLESETNLEILLKGWKLVARNPRLRLFVSANLLEIFSNTIWVSSIILVFVTELLNKTESYWGYSNTAYSIGIIISGLIAFRLSEKFLAAK

SEQ ID NO: 4935 - DNA, 252 bp, Streptococcus pneumoniae
atgaaactaacttatgatgataaagttcagatctatgaacttagaaaacaaggatatagcttagagaagctttcaaataaatttgggataaacaattctaatattaggtacatgattaaattgattgatcgttacggaatagagttcgtcaaaaaaggaaaaaatcgttactattctcctgatttaaaacaagaaatgattaatcccaaatcattcatacctctctcaactagatgtaacttacaaaacccc

SEQ ID NO: 4936 - protein, 84 aa, Streptococcus pneumoniae
  IS3-Spn1, hypothetical protein, interruption; Cellular location: cytoplasm; Similar to strain R6 sequence 15903492 (4.E-82)
MKLTYDDKVQIYELRKQGYSLEKLSNKFGINNSNIRYMIKLIDRYGIEFVKKGKNRYYSPDLKQEMINPKSFIPLSTRCNLQNP

SEQ ID NO: 4937 - DNA, 186 bp, Streptococcus pneumoniae
aatgaaaatcacaacaggctcattcatagatggttacctaagcctaagggaactaagaaaacgactaccaaggaagtcgcattcatcgaaaagtagattaacaactatcctaaaaaatgcttgaactacaagtcccccagagaagacttctggatgactaacttgaacttgaaatttagcaataat

SEQ ID NO: 4938 - skipped

SEQ ID NO: 4939 - DNA, 243 bp, Streptococcus pneumoniae
atggggtggaattttcgtgtcgtaaatctactatctctacattcccaaacaaaaaaccccagcataagcagggcatctaagcatttaattcaaagtaaaatacaaaccaaacgacataggtcacgaggaggagaaaaagcgagtagagagtcacaaaggtcattttccacaagaacttggtttgtcgtcgttccagtttggcaaatagaagattccccgcataaacgcaagcaacaaaaacaa

SEQ ID NO: 4940 - protein, 81 aa, Streptococcus pneumoniae
  competence-induced protein Ccs1 (ccs1); Cellular location: cytoplasm
MGWNFRVVNLLSLHSQTKNPSISRASKHLIQSKIQTKRHRSRGGEKASRESQRSFSTRTWFVVVPVWQIEDSPHKRKQQKQ

SEQ ID NO: 4941 - DNA, 324 bp, Streptococcus pneumoniae
gtggatagtaattatttctcagatgacctggcttttcatagctttagtatgcgcgaagacacaacaggtgaggtattggcgattaccaacaatggacaggaaaaccatctggttaagatggcattcttggaattaaaaaatacagagaaaccagcaaagacaaggttcgcaagccatggttggagtttttcggcaacaagccctttacccagcaaccgcaacgagccattacccaagcaaatcaactgctggactacaagagctggtccgaggaggacaggaaaatgtttagtcaactacatatgcgagaagaacaagtcttgt

SEQ ID NO: 4942 - protein, 108 aa, Streptococcus pneumoniae
  competence-induced protein Ccs16 (ccs16); Cellular location: cytoplasm
MDSNYFSDDLAFHSFSMREDTTGEVLAITNNGQENHLVKMAFLELKNTEKPAKTRFASHGWSFSATSPLPSNRNEPLPKQINCWTTRAGPRRTGKCLVNYICEKNKSC

SEQ ID NO: 4943 - DNA, 174 bp, Streptococcus pneumoniae
atgtggtataatccttttatggcatattcaatagattttcgtaaaaaagttctctcttattgtgagcgaacaggtagtataacagaagcatcacacgttttccaaatctcacgtaataccatttatggctggttaaagctaaaagagaaaacaggagagctaaaccaccaagta

SEQ ID NO: 4944 - protein, 58 aa, Streptococcus pneumoniae
  IS630-Spn1, transposase Orf1, truncation; Cellular location: cytoplasm; Similar to strain R6 sequence 15902123 (2.E-31)
MWYNPFMAYSIDFRKKVLSYCERTGSITEASHVFQISRNTIYGWLKLKEKTGELNHQV

SEQ ID NO: 4945 - DNA, 874 bp, Streptococcus pneumoniae
atggcagacgaactaattagtattgtagttccaatctacaacgttgagaattatttgcgaatgtgtttggatagcattcagaatcagacgtatcaaaattttgagtgtttattaatcaatgatggctctccagatcattcatccaaaatatgtgaagaatttgtagagaaagattctcgtttcaaatattttgagaaagcaaacggcggtctttcatcagctcgtaacctaggtattgaatgttcgggggggggcgtacattacttttgtagactctgatgattggttggaacatgatgctttagaccgattatatggtgctttgaaaaaggaaaacgcagatattagtatcgggcgttataattcttatgatgaaacacgctatgtgtatatgacttatgttacggatccagatgattctctagaagtgatagaaggtaaagcaattatggatagggaaggtgtcgaagaagtcagaaatgggaactggactgtagctgtcttgaagttattcaagagagagttactacaagatttaccatttcctataggaaaaattgcagaggatacttactggacatggaaggtacttctaagagcttcgaggatagtctatttgaatcgttgtgtttactggtaccgtgttggtttatctgatactttatcgaatacatggagtgaaaagcgtatgtatgatgaaattggggctagggaagaaaagatagctattttagcaagttcagactatgacttgaccaatcatattttgatttataaaaatagattacaaagagtgatagcaaaattagaagaacaaaatatgcagttcacagagatttacagaagaatgatggaaaaattgtctttacttccg

SEQ ID NO: 4946 - skipped

SEQ ID NO: 4947 - DNA, 201 bp, Streptococcus pneumoniae
atgaatacttattgtaatataaatgaaacaatgctgagtgaggtttatggaggtaattccggaggagcagctgtagttgctgctttaggttgtgcagcgggtggagtgaaatatgggagacttctaggaccatggggcgctgcaataggaggaattggaggagcagtggtttgtggatatttagcctataccgctacatca

SEQ ID NO: 4948 - protein, 67 aa, Streptococcus pneumoniae
  blpN protein (blpN); Cellular location: membrane
MNTYCNINETMLSEVYGGNSGGAAVVAALGCAAGGVKYGRLLGPWGAAIGGIGGAVVCGYLAYTATS

SEQ ID NO: 4949 - DNA, 129 bp, Streptococcus pneumoniae
tctagtataaatagcgagaaatatctatcctatcttctagaatgtcttccaaacgaggaaactctcgtaaacaaagaggttttagaggtctatttaccgtggactaaagttgtacaagaaaagtgcaaa

SEQ ID NO: 4950 - protein, 43 aa, Streptococcus pneumoniae
  IS66 family element, Orf3, internal deletion; Cellular location: cytoplasm; Similar to strain R6 sequence 15902370 (2.E-19)
SSINSEKYLSYLLECLPNEETLVNKEVLEVYLPWTKVVQEKCK

SEQ ID NO: 4951 - DNA, 156 bp, Streptococcus pneumoniae
atgtcgtatagtagaagtgtattattctagtttcaatatactatagtagctcagaagtcggtacttaaacgtgctatatcaaaaccagtcctggaaaaacgtggactggtttcgtgtttggattattaccttgaacgacatgcgttaaaagttagt

SEQ ID NO: 4952 - skipped

SEQ ID NO: 4953 - DNA, 86 bp, Streptococcus pneumoniae
gtgctatatcaaaaccagtccttgaaaaacgtggactggtttcgtgtttggattattaccttgaacgacatgcgttaaaagttagt

SEQ ID NO: 4954 - skipped

SEQ ID NO: 4955 - DNA, 618 bp, Streptococcus pneumoniae
atggcacaaaagactcatagtttatcatacacaaagtggaggtgttctatcatattgtgttcacccctaagtatagacgaaaagtcatctataatcaatatagaagtagtttagacgaaatatttcatcgcttgtgtagttataaaggtgttgaaatgatcgagggtcacttaatgccagaccatgtacacatgttagtcagtattccgtcgaggctaagtgtttcaagttttatggggtatttaaaaggcaaaagtgcactcatgatgtttgacaaacacgccaatctcaagtacaagtttgggaatcggcatttctgggaggaaggttattatgtaagtccagtagggcttaatgaagccacaattaagaaatatagtcaagattaaagaaattatcgagtggatgatttcttcatgagtatgaaaatttgagaacgagtaaagtatgatatatagtaaaatgaaataagaacaggacaaaatcgatcaggacagtcaaatcgatttttaacaatgttttagaagcagaggtgtactattccagtttcaatctactatagcactagataaattgagtgtaaaagaatatgaggatccctttagggatagtggtaag

SEQ ID NO: 4956 - skipped

SEQ ID NO: 4957 - DNA, 349 bp, Streptococcus pneumoniae
atggctccgatgacctataaagatacgatgacgagtgactttttcgaagcttgcttccaaaaattcttactacctactttagatacaccatcccttatcattatggacaatgcaaggtttcacagaatgaacatgtgtaaggagcagggcatagactgttaccacttcctacctattcacccgagtataatcccattgagaaaatatgggcttacatcaaaaacatctcagaataatattgtcaaattacgatgcttttcttgaggcacttttgtcctattcttgtttcagccgactatactccgttattgggcagctacggaacagtcgatgggacgatggggggaca

SEQ ID NO: 4958 - skipped

SEQ ID NO: 4959 - DNA, 237 bp, Streptococcus pneumoniae
atgaatgaacgttaccagtgtttaaaaactaaagaatatcaggcacttttatcttccaagggtagacaaattttcgctaaacgtaagattgatatgaaatctgtctttgggcagataaaggtttgtttgggttataagagatgtcatctgagaggtaagcgtcaagtgagaattgacatgggattcgtactcatggccaacaacctgctgaaatataataagagaaagaggcaaaat

SEQ ID NO: 4960 - protein, 79 aa, Streptococcus pneumoniae
  conserved domain protein (50S Ribosomal protein); Cellular location: cytoplasm; Similar to strain R6 sequence 15902920 (3.E-24)
MNERYQCLKTKEYQALLSSKGRQIFAKRKIDMKSVFGQIKVCLGYKRCHLRGKRQVRIDMGFVLMANNLLKYNKRKRQN

SEQ ID NO: 4961 - DNA, 147 bp, Streptococcus pneumoniae
gtgcgagtaaaaatcaatctcaaatgctcctcttgtggcagtatcaattacctaaccagtaaaaattcaaaaacccatccagacaagattgaggttttaaagtattgtcccaaggaaagaaaagtaaccctacatcttgaatctaag

SEQ ID NO: 4962 - protein, 49 aa, Streptococcus pneumoniae
  ribosomal protein L33 (rpmG); Cellular location: cytoplasm; Similar to strain R6 sequence 15903669 (8.E-80)
MRVKINLKCSSCGSINYLTSKNSKTHPDKIEVLKYCPKERKVTLHLESK

SEQ ID NO: 4963 - DNA, 219 bp, Streptococcus pneumoniae
ttgctgctcttttacgttggcaggctgaacggtcagaagtatcattgtatatcatttgtatcatggcatataaagtatcgctctattttattgatgattttaaaatcgctcttatcatggcgagccattcaaatttgctccacaaatgaggaaagtaccattttaggctattcagttgtcaaagggcaaataaaaaatctcactcattttcaaactcta

SEQ ID NO: 4964 - protein, 73 aa, Streptococcus pneumoniae
  hypothetical protein; Cellular location: cytoplasm
MLLFYVGRLNGQKYHCISFVSWHIKYRSILLMILKSLLSWRAIQICSTNEESTILGYSVVKGQIKNLTHFQTL

SEQ ID NO: 4965 - DNA, 309 bp, Streptococcus pneumoniae
atgatagaggcacagggtttcttagtggataagcaaacaagatgcattcattaccatagcaagctggatattattgctttacaatgctatgattgtaaaaagtattatgcttgttatcggtgtcatgattcattagaacatcacccttttgagccgtatcccttatctttgatacaggataagcctattttatgtggtgtttgtctaaaactactaacatataagcaatataaagaaagcttaagttgccccttttgtttttctcgctttaatccaggttgccaaaatcataaggaacgctattttaaa

SEQ ID NO: 4966 - protein, 103 aa, Streptococcus pneumoniae
  conserved hypothetical protein; Cellular location: cytoplasm
MIEAQGFLVDKQTRCIHYHSKLDIIALQCYDCKKYYACYRCHDSLEHHPFEPYPLSLIQDKPILCGVCLKLLTYKQYKESLSCPFCFSRFNPGCQNHKERYFK

SEQ ID NO: 4967 - DNA, 150 bp, Streptococcus pneumoniae
atggcactaaaaaaagcaagcctagcttgtgcggtttgtggttcgagaaactattcaatcaagatcagcggaaacctcaagcctacacgactagaagtaaataaattttgtaagcattgtggcaagtacactacacacagagaaacgaga

SEQ ID NO: 4968 - protein, 50 aa, Streptococcus pneumoniae
  ribosomal protein L33 (rpmG); Cellular location: cytoplasm; Similar to strain R6 sequence 15903864 (2.E-25)
MALKKASLACAVCGSRNYSIKISGNLKPTRLEVNKFCKHCGKYTTHRETR

SEQ ID NO: 4969 - DNA, 282 bp, Streptococcus pneumoniae
atggaacaattacattttatcacaaaattactagacattaaagaccctaatgtccagattttaaacatcatcaataaggatacacacaaggaaatcatcgccaaactggactacgacgccccatcttgccctgagtgcggaaaccaattgaagaaatatgactttcaaaaaccttctaaaattccttatcttgaaacgactggtatgcctacaagaattctccttagaaagcgtcgattcaagtgctatcactgttcaaaaatgatggtcgctgaaacttct

SEQ ID NO: 4970 - protein, 94 aa, Streptococcus pneumoniae
  IS1167, transposase, truncation; Cellular location: cytoplasm; Similar to strain R6 sequence 15902073 (2.E-52)
MEQLHFITKLLDIKDPNVQILNIINKDTHKEIIAKLDYDAPSCPECGNQLKKYDFQKPSKIPYLETTGMPTRILLRKRRFKCYHCSKMMVAETS

SEQ ID NO: 4971 - DNA, 1341 bp, Streptococcus pneumoniae
atgaaggagatttttatggctaaaaaaggtaccctaacaggtttgctcctgtttggaatattttttggtgcggggaacttgatttttccgccttctctaggtgctctatctggagaacattttcttcctgccatcgcaggttttgtcttttcaggcgttggtatcgccgtcttgacccttattattggaacgctaaatcctaaaggatatatctacgagatttcaacgaagatagcgccttggtttgcgactctttacctctcagttctttacttgtcaatcggtccattctttgctaccccacgtactgctacaacagcttacgaagtagggattagcccccttttgtcggatgcaaataaaggacttggcttgattgtatttacggttctgtattttgcggcagcctatttgatttcgcttaatccatcaaaaatcttagaccgcattggacgtattttaacgccagtctttgcaattttgattgttatcttggtcgttctgggagctatcaaatatggtggaacaagtcctcaagctgcttcagctgcttatcaagcttctgcctttggtacaggtttcctagaaggttacaataccttggacgcccttgcctcagtggcctttagcgtaatcgcagttcaaaccttgaaacaacttggattttcaagtaagaaagaatacatttcaactatttgggttgttggtatcgttgttgcccttgccttcagcgctctttacatcggtttaggttttcttggaaatcatttcccagtaccagctgaagcgatgaagggtggaacaccaggtgtttacatcttgtcacaagccactcaagaaatctttggctcaacagctcaactcttccttgcagctatggttaccgtaacctgcttcacaacgactgttggtttgattgtgtcaacagctgagttctttaatgagcgcttcccacaaatcagctacaaggtttatgcgacagcctttaccttgattggatttgctattgccaatttgggtcttgatgcgattatcaagtactcaattccagtactggttatcttgtacccaatcacgattgctatcgttatgattgtcattgtcaacaaatttgttgccctttcaaaaccaggtatgcagttgacaattgctgtggttacagttattgccattgcaagcgtactaggaagctcgtttaaggttgagtttcttgcaaatcttgttagcgttcttccttttgccaaggcatctctcccatggttggtgccagccattgttggaatcttgctctcattggttctaccaaacaagcaagaaagcgatgtttttgaaatggaataa

SEQ ID NO: 4972 - protein, 446 aa, Streptococcus pneumoniae
  branched-chain amino acid transport system II carrier protein (brnQ)
MKEIFMAKKGTLTGLLLFGIFFGAGNLIFPPSLGALSGEHFLPAIAGFVFSGVGIAVLTLIIGTLNPKGYIYEISTKIAPWFATLYLSVLYLSIGPFFATPRTATTAYEVGISPLLSDANKGLGLIVFTVLYFAAAYLISLNPSKILDRIGRILTPVFAILIVILVVLGAIKYGGTSPQAASAAYQASAFGTGFLEGYNTLDALASVAFSVIAVQTLKQLGFSSKKEYISTIWVVGIVVALAFSALYIGLGFLGNHFPVPAEAMKGGTPGVYILSQATQEIFGSTAQLFLAAMVTVTCFTTTVGLIVSTAEFFNERFPQISYKVYATAFTLIGFAIANLGLDAIIKYSIPVLVILYPITIAIVMIVIVNKFVALSKPGMQLTIAVVTVIAIASVLGSSFKVEFLANLVSVLPFAKASLPWLVPAIVGILLSLVLPNKQESDVFEME

SEQ ID NO: 4973 - DNA, 1161 bp, Streptococcus pneumoniae
atgaagaaaaaatttgccctatcgtttgtggcgcttgcaagtgtagcacttcttgcagcctgtggagaagtgaagtctggagcagtcaacactgctggtaactcagtagaggaaaagacaattaaaatcgggtttaactttgaagaatcaggttctttagctgcatacggaacagctgaacaaaaaggtgcccaattggctgttgatgaaatcaatgccgcaggtggtatcgatggaaaacaaatcgaagtagtcgataaagataataagtctgaaacagctgaggctgcttcagttacaactaaccttgtaacccaatctaaagtatcagcagtcgtaggacctgcgacatctggtgcgactgcagctgcggtagcgaacgctacaaaagcaggtgttccattgatctcaccaagtgcgactcaagatggattgactaaaggtcaagattacctctttattggaactttccaagatagcttccaaggaaaaattatctcaaactatgtttctgaaaaattaaatgctaagaaagttgttctttacactgacaatgccagtgactatgctaaagggattgcaaaatctttccgcgagtcatacaagggtgaaatcgttgcagatgaaactttcgtagcaggtgacacagacttccaagcagcccttacaaaaatgaaagggaaagactttgatgctatcgttgttcctggttactataatgaggctggtaaaattgtaaaccaagcgcgtggcatgggaattgacaaaccaatcgttggtggtgatggattcaacggtgaggagtttgtacaacaagcaactgctgaaaaagcatcaaacatctactttatctcaggcttctcaactactgtagaagtttcagctaaagctaaagccttccttgacgcttaccgtgctaagtacaatgaagagccttcaacatttgcagccttggcttatgattcagttcaccttgtagcaaacgcagcaaaaggtgctaaaaattcaggtgaaatcaagaataaccttgctaaaacaaaagattttgaaggtgtaactggtcaaacaagcttcgatgcagaccacaacacagtcaaaactgcttacatgatgaccatgaacaatggtaaagttgaagcagcagaagttgtaaaaccataa

SEQ ID NO: 4974 - protein, 386 aa, Streptococcus pneumoniae
  branched-chain amino acid ABC transporter, amino acid-binding protein (livJ)
MKKKFALSFVALASVALLAACGEVKSGAVNTAGNSVEEKTIKIGFNFEESGSLAAYGTAEQKGAQLAVDEINAAGGIDGKQIEVVDKDNKSETAEAASVTTNLVTQSKVSAVVGPATSGATAAAVANATKAGVPLISPSATQDGLTKGQDYLFIGTFQDSFQGKIISNYVSEKLNAKKVVLYTDNASDYAKGIAKSFRESYKGEIVADETFVAGDTDFQAALTKMKGKDFDAIVVPGYYNEAGKIVNQARGMGIDKPIVGGDGFNGEEFVQQATAEKASNIYFISGFSTTVEVSAKAKAFLDAYRAKYNEEPSTFAALAYDSVHLVANAAKGAKNSGEIKNNLAKTKDFEGVTGQTSFDADHNTVKTAYMMTMNNGKVEAAEVVKP

SEQ ID NO: 4975 - DNA, 1260 bp, Streptococcus pneumoniae
atgaaagtctttcagcatgtaaatatcgtgacttgtgatcaagatttccatgtttatcttgatggaatcttagcagtcaaggattctcaaatcgtctatgtcggtcaagataagccagcgtttttagagcaagctgagcagattatagactatcagggagcttggattatgcctggtttggtcaattgtcacacccattctgcaatgacaggtctgagagggatccgagatgacagcaatctccatgaatggctcaatgactatatttggccagcagaatctgagtttactcccgacatgactaccaatgcggtcaaagaagccctgacagagatgctccagtcaggaacaacaacctttaacgatatgtataatcccaatggtgtggatatccagcaaatttatcaggtggtgaaaacttccaagatgcgttgttatttttctccgactctcttttcttcagagacagaaacaactgctgagactataagtagaactcgatccatcatagacgaaatcttaaaatataaaaatccaaatttcaaggttatggtagcacctcattctccgtatagctgcagtagagacttgctggaagcgagtttggaaatggcaaaagagctaaatattccgctccatgtccatgtggcggagaccaaggaggagtcaggaattatcctcaaacgatacggcaaacgcccccttgcttttcttgaagaactgggttatttagatcatccgtccgtatttgctcacggggtcgaattaaacgagagagaaattgaacgcttggcatcttctcaagtggctatcgcccacaatcctatcagtaacctcaaactggcatcaggaattgctccaattatccagctccaaaaagcgggagtagcagtcggaattgcgactgactcggttgcttccaataacaatctagatatgtttgaggaaggaaggactgcagctcttcttcagaagatgaaaagtggggatgccagccagtttccaatcgaaacagctctcaaggtactgacaatcgaaggggctaaggtccttggaatggaaaatcagataggaagtctggaagtcggcaagcaagcagattttctggtcattcaaccacaagggaaaattcatctccaacctcaggaaaatatgctgtctcacctggtttatgcagttaaatctagtgatgtagatgatgtttatatcgccggagaacaggttgttaagcaaggtcaagtcctgacagtagaactttaa

SEQ ID NO: 4976 - protein, 419 aa, Streptococcus pneumoniae
  Atz/Trz family protein
MKVFQHVNIVTCDQDFHVYLDGILAVKDSQIVYVGQDKPAFLEQAEQIIDYQGAWIMPGLVNCHTHSAMTGLRGIRDDSNLHEWLNDYIWPAESEFTPDMTTNAVKEALTEMLQSGTTTFNDMYNPNGVDIQQIYQVVKTSKMRCYFSPTLFSSETETTAETISRTRSIIDEILKYKNPNFKVMVAPHSPYSCSRDLLEASLEMAKELNIPLHVHVAETKEESGIILKRYGKRPLAFLEELGYLDHPSVFAHGVELNEREIERLASSQVAIAHNPISNLKLASGIAPIIQLQKAGVAVGIATDSVASNNNLDMFEEGRTAALLQKMKSGDASQFPIETALKVLTIEGAKVLGMENQIGSLEVGKQADFLVIQPQGKIHLQPQENMLSHLVYAVKSSDVDDVYIAGEQVVKQGQVLTVEL

SEQ ID NO: 4977 - DNA, 849 bp, Streptococcus pneumoniae
atgaatacaaatctcaagcccaaacttcagcgttttgcttctgcgactgcctttgcctgtcctatctgtcaagaaaatctgactctgttagagactaatttcaagtgctgcaaccgtcattcttttgacttggcgaaatttggctatgtcaatctagtccctcaaatcaagcaatctgctaactacgacaaggaaaattttcaaaaccgtcaacaaatcctagaagccggcttttaccaagctatcttagatgctgtatctgacttgcttgcaagctcaaaaactaccacaacaattttggatatcggttgtggtgaaggattctattctcgcaaactacaagaaagtcactctgaaaaaactttctatgcctttgacatctccaaagattcagtccaaatcgctgctaaaagtgaacccaactgggcagtcaattggttcgttggcgacttggcacgacttcctataaaagacgctaacatggatattctgcttgatatcttctcacctgccaactatggagaatttcgtcgcgttttatccaaagacggtatcttgataaaggttatcccaactgaaaatcacctcaaagaaatccgtcaaagagtacaggaccagctgacaaacaaggagtattctaaccaagatatcaaggagcatttccaggaacactttaccatcctatctagtcaaactgcctctctgactaagactatcacagcagaacaactccaagccctactcagtatgactcctctcctctttcacgttgaccagagcaaaattgactggagcaaactgacagagattaccatcgaagcagagattttggttgggaaagcattctaa

SEQ ID NO: 4978 - protein, 282 aa, Streptococcus pneumoniae
  rRNA (guanine-N1-)-methyltransferase (rrmA)
MNTNLKPKLQRFASATAFACPICQENLTLLETNFKCCNRHSFDLAKFGYVNLVPQIKQSANYDKENFQNRQQILEAGFYQAILDAVSDLLASSKTTTTILDIGCGEGFYSRKLQESHSEKTFYAFDISKDSVQIAAKSEPNWAVNWFVGDLARLPIKDANMDILLDIFSPANYGEFRRVLSKDGILIKVIPTENHLKEIRQRVQDQLTNKEYSNQDIKEHFQEHFTILSSQTASLTKTITAEQLQALLSMTPLLFHVDQSKIDWSKLTEITIEAEILVGKAF

SEQ ID NO: 4979 - DNA, 2162598 bp, Streptococcus pneumoniae
tggaatccgcccaggtgaaaaactctacgaagaactcttggtatcaaccgaactcgttgataatcaagttatggataagattttcgttggtaaggttaatgtcatgcctttagaatccatcaatcaaaagattggagagttccgcactctcagtggagatgagttgaagcaagctattatcgcctttgctaatcaaacaacccacattgaataaaaaagaaaaacgcatagtatcaagttacacaaccttggtaatatgcgttttattatgtagagacttatactcttcgaaaatctcttcaaaccacgtcaacgtcgccttgccgtatatggttactgacttcgtcagttctatccacaacctcaaaacagtgttttgagctgacttcgtcagttctatccacaacctcaaaacagtgttttgagctgacttcgtcagttctatccacaacctcaaaacagtgttttgagctgacttcgtcagttccatccacaaccttaaaacagtgttttgagctgacttcgtcagttccatctacaaccttaaaacagtgttttgagctgcccgcagctagtttcctagtttgctctttgattttcattgagtattacttcattttcttctgaaatggaattgttacccagtctatgctattgaaaatacgccaaaacttctaagggtttgtgagcgatataatcaggttgatagtttagtagatctgcttgctctccaaatccccaagtgatggccaatttctgaatacctgtttctcgagctcccagcatatcaaacttggtatctccgatgatgatggcttgttctggtgctagttgatgtgtctgcaaggcttggtgaatgacatctgccttatggggtgcttcagggctagaaccataaatgccatcaaagaaatgatggatttccaagttttttgccatgtcttgagcagtagatgtatcctttgtcgtggtgatgtagagtggataactgctcgataactcctcaagcaagtctataatctgaggaaagagttgagcttcatagatgccttttgccttatagtaagaacgatatatctgcacggcttcagaaatttggtctttggacaggcaggtcgcaaaactactttcgagaggtggtcccataaaaccacgaatagttttggcatcagggctaggcacccccagctctttaaaggtataggtaaaggcattgtgaatcccgatagaactatcaacgagggttccatccaaatcgaaaaaaatcgctgtgatagaggtcatggtttctcctatttgataagcttattctccgaaaatttctttttggaggcgacgaccagtaggggtggtagcgagtccaccttcagctgtttcacgaaaggcagttggcatgcttgctcctacttggtacatggcatcgatcacttcatccacagggattttagattcgatacctgccaaggccatgtctgctgcgatgaaagcaaagctagctcccatggcattacgtttgacacagggaacttcgaccaaacctgcaacagggtcacagatgaggcctagcatatttttaatgacaaaggcaatagcttgactggcctgataaggtgttccacctgcagccagagtcaaggcggcagcactcatagcagaggctgaaccaacttcagcttgacacccaccctcagcacctgagatggaggcattgtttgcgatgactagtccaaaggcaccagcagcaaagaggaaatccaattgttgctcgtggctgaggtctaatttttcaatagcagcagtgagaacggatggcagacagccagcacttccagcggttggagtggcacagaccaagcccattttggcattgtgttcattgactgcgatggcatttcgggcagccgagagaatcgtataatctgacagagtttttccgttttcgatgtagtgatccaatttggcagcatctccacctgtcaggccactacgagatttattttcattgaggccaagttggacagaggctttcataacttccagattgcgttccatgagaaggaagacttcttcacgttcgcgaccggtcaattcaaactctgttgtaatcatgagttctgcgacatttccttgaaagtccagatctgcttgctcgaccaattctttgatagaataaaacatgcttcctcctatttaaagaaattgacattgtggagatgagggatttttcgaatttcttcgatagcctcatcacagttgcgactgtcaacttcgataatcataatggctttttcaccagctttttcacgagtgacattcatctgggcgatattgataccatagcgggaaagcgcctctgtaacaagggcaatcatacctggaatatcttgatgaacgatgatgatagtcggtgtattcatattgagagagacggcaaaaccattgagttcggttacctgaatatttcctccaccgatagaaataccagtcacgctgatggtcttgtgggcatttttaacagtaattttagtggtgttagggtgaggggcattgctgtctttctgaatggtccagacaatcttgataccacgcttgtgggcaatttccagactatttggaatttcaggatcatctgtatccattcctaaaatacctgcaacaagggctaggtctgttccgtgaccacgataggtcttggcaaatgagttaaaaagttggaattcaacttctgtcggagtatcatcaaaaatggaagagacaatcttcccaatacgaacagcaccagcggtatggctactagatgggccaatcataactggtccgatgatatcaaagacagattgaaaacgaagtgatttcatcagtttccccttataaaaattcttatctctattatatcaaagaatgaggggcttggctttaattgtggatgaaaacctttctaatacctcaaatagcataaaaatagtatcttttatgacaaaaaacaccttatttagggaaataaaaaataattttgtaatatttctacataaaagtgtcaagaaacggtaatatttaaagggtatgatagaactatagaaagaaggagaattttcgaatatgaaatcaataactaaaaagattaaagcaactcttgcaggagtagctgccttgtttgcagtatttgctccatcatttgtatctgctcaagaatcatcaacttacactgttaaagaaggtgatacactttcagaaatcgctgaaactcacaacacaacagttgaaaaattggcagaaaacaaccacattgataacattcatttgatttatgttgatcaagagttggttatcgatggccctgtagcgcctgttgcaacaccagcgccagctacttatgcggcaccagccgctcaagatgaaactgtttcagctccagtagcagaaactccagtagtaagtgaaacagttgtttcaactgtaagcggatctgaagcagaagccaaagaatggatcgctcaaaaagaatcaggtggtagctatacagctacaaatggacgttatatcggacgttaccaattaacagattcatacctgaacggtgactactcagctgaaaaccaagaacgtgtagcagatgcctacgttgcaggacgttacggttcatggactgctgctaaaaacttctggcttaacaatggctggtattaagaactaacgaacaaataatatgtaaagagtcgaggaaatccctcggcttttttatctttccttcgcttggtaatagatctctacttcttttttgagatgagacagcatagaagtttcctcggttagctccagaagggagaaccctttttggataagtttagaatcgtctgtacaaatcccaatagggacatagcagatagccagcctatcgtaacttttcttattcttggcgtcctccagtaaagtatagcagatttgcttacacatgtttttatcttgattgtatagatagagtgtggaaaggttgagcaggattgctattcgcaagtcatataaacgttgatagtttttatagacttctaagcgttgcaagattttctcggattattgacaaataaacggacattctgatagacgattgccctagcggcttagtgtaaactttacaaatttggcttgtaatttttttataaaattcacttcagatacttgacagttattatattttcgcttatgcttattatatagataaaaggacgggataggagtttaaaaatttgaaagcgctatccatattgtttattggactgattcttgagtaatagttagagtttgcttaatactactctggttgttcaaggacctgatacagaagcgcaccattctcccggttaagagtaagttcgttgttaaaaaatgaaatgagatagaaggaaggtgagtccaatggactacgatacttgttgataaattactatagctgtttttacggaacagctctcgataataggagaaataaatcatgagaaaattagttaaaattggtgttgcatctttaatggtatgtggtatacttgctactacaaatgctttagcagtatgggttgagggtggtcaatggaactatggagtaggttggacaggaacttttggatattctgattacttacattctactcgatatcatacagcaactgttagacatgggggtagaacctctaaggattatgcaaaacctgaggcatgggctagagcttccctcaccaagattccgccaacaggaatggaatatttctatggatttgagtaaaattcttccctctcctatttggagagggaaaactgtagtggaggcacttttatgaaaaaaatcagtaatttctgtatgttactcctgcttctgtgtaccactttttttgtttttaatgtaaactatacacgagaagtggttcggattcaagaaatgggaaagactgtagattctttggatttgtatttgaaagatattaacgaacctgcagcgtctgttcttcgattttttgaggatgtatcaaaggagtataaagtctccatcatcaaaacagacagtggtgatgaggtggtcaagtctggtgtttttgataaagataccttcccctaccaagagtttgggatttcttctcttgattttaccacagatggtgaaggagtctatagtaataaagaaatttccaataaacttggtacgattccgacctttctaaaagccaaacctattcagcttatgacttttcaaacctatatcaaggatacatctcgtagtttaaatggtcgctatacgataacttctacacaagagatggacaaggataggattgtacagaaatggagcgattttttcaagatagaccaggctaccttgctagagccgacctacaaaagtgcagtggaagtcataaatcgagatttgcttttatctgccattgtttttgtcttggctattttgcttcttgtgttagtgacagtgtatcaaccgatgatggagatgaaaagagttggggtacaaaaattacttggttttcaagatagggctgttttagctgatgttgtaaaaggcaacctttacctcctcctaggtggggctcttgtgatcaatctaggcgtgtttttcttgcttgattataagccaaaagatttgtttcctatgctgtggttgtctcattttttgctgttgcagctttatctctttatcagttggttgacttacctcttaatccaaaaaatgacaatcagctctctgctgaaaggtttttcatctttcaaatttggtcttatcttcaattatgtgatgaaaatagggacaactattttactgacggccttactgattggggtgggcagaagtttagaacaagaaaacaaagaacttgcttatcagcaacagtgggtaagtcaaggtaattacctgaccttagaaaccttcaaactcaatgataatctgtggcaagaagagctagcagggtcagggaaatctacagattatttctatcgattttatcaggatttggtagaaaaaacgcaggcgggctatgtgcagagtagcagtcttcctgtaaaaaattttgtccaatcagaacagattcagcaatatcagttaacagatacggtggatgtttactatgccaatcgcaattttctaaagagcaagggattcaagctaccaaataccggtattaaaaaagttattttgatgccagcaagtacgaaaggtgaagaagataaaaatcagctcttggggaagttaattgcctttcattcgatgaagtatgaagagcagcaaaaacgaacgatagaggagatggatgtcgagattgcctattatgaaggagattggtcatttttcccatatagtgataagcgaaaggaaaatctctccaatccaattattagcttggtcaatgattctgatatgatgtgggatgagaaagcctccctgtcaacaactggcttaaataatccgattaaaattgaaaatacggttcaacatcaaaaagagattacagagttagttgagaaattgtcagatggaaattatttaaaattttcatctattcaagccattcaacaagagaaagtggattcttatcgagatgctgttcggaattttaacctactctttgctttgtttggtctccttagcatgatgatttcctacttcttactagtaacaactttcttattgaagcgcagggatatcattaccaagaagtttatggggtggaaactggtcgatcgctaccgtcctctcctcgttctgctcttgctgggctatagtttccctcttctagtcttgattttctttgcccatgcgttcttaccacttctactgtttgcaggttttacatgtctggatatactatttgtgctaggcttagcttctaggatggagaaaagaagtctagtagagttattgaaagggggcatcttatgattgagttgaaaaatattaccaaaaccattgggggaaaagtgattttggataacttatctctcaggattgatcagggggatttggtagctattgttggtaagagtggtagtgggaagtcgaccttgttaaatttattgggtttgatagatggtgattatagcggacggtatgagatttttggtcagacaaatctagcggttaattctgctaagtcgcaaacaataatccgtgaacatatctcttatctgtttcaaaattttgccctgattgatgatgaaacggtcgagtacaatctcatgctggcgctgaaatatgtgaaattgcctaagaaagacaagctcaaaaaggtggaagagattttagagagagtaggtttatcagctactttgcatcaaagggtctccgagttgtctgggggcgaacaacaacgaattgcagttgctagagccatcttaaaacccagccagctgattttagccgatgaaccgacaggttctctggatcctgaaaatagagatttggtcttgaagtttctcttagagatgaatcgagaggggaaaacagtcattatcgtgacccacgatgcttatgtagcccaacaatgtcatcgaatcattgaattaggcgagggaaaatgagttcgttcagcttcatttgaccgactgaatactcatatttttcagagagaaatagcataaataggcctaggaatgatatttttatgtcattttcctgggtttttctgttttaaattgaaaaaaattacaatttaggcttgacaaaggatgcatatagatgtattgtttatacaaataaaaggaataaacataaagtaggctttattatgaataagatgaagaaggtgttgatgacgatgtttggtttagtgatgctccccctactatttgcttgtagcaacaatcaatcggctggaattgaagccatcaagtccaaaggaaaattggttgtagccctcaatccggattttgctccatttgaataccaaaaagtggttgatgggaaaaatcagattgtgggttcagatatcgaattagccaaggctatcgcaacaaaactaggtgtcgaattggaactatctcccatgagttttgataatgtactggctagtgttcaatcaggaaaagccgaccttgccatatcaggtgtttctaagacagatgaacggagcaaggtgtttgacttttccattccctactatactgcaaaaaataaactcattgtcaaaaaatctgacttgactacttatcagtctgtaaacgacttggcgcagaaaaaggttggagcgcagaaaggttcgattcaagagacgatggcgaaagatttgctacaaaattcttccctcgtatctctgcctaaaaatgggaatttaatcacagatttaaaatcaggacaagtggatgccgttatctttgaagaacctgtttccaagggatttgtggaaaataatcctgatttagcaatcgcagacctcaattttgaaaaagagcaagatgattcctacgcggtagccatgaaaaaagatagcaagaaattgaaagaggcagtcgataaaaccattcaaaagttgaaggagtctggggaattagacaaactcattgaggatgcctttaaagcatccattgaaaaatagaaagaaggaaaagaacatgagtaaagaaaaagtaattttggcctattctggcggtttggacacatcagttgctattacctggttaaagaaagactatgatgttgtttcagtttgtatggatgtgggtgaagggaaagacttagatttcatccatgataaggctcttaaggtttgggcagtagaatcttatgtcattgatgttaaggacgaatttgctacagattatgtgctagtggctcatcagtcacatgcctattatgaacaaaagtatctcttggtatctgccttgagccgccctctgatttctaaaaaattggttgaaatagcgcatcagataggagcgactacaattgctcatggttgtaccggtaaggggaatgaccaagtcgaataccagattgcagtcgctaagaaagcgaatgaagctaaaaagtgatggagtgatgggttcagaataagaggttggtagattatcagcctctttcttgtcgttgaaaaagtgagatatattgacttttgaaaaaaatgtcataattgagttgggataaacgtaaaagtcatactttctcgttaaatcgttcggcgattctatgaaaaggtcgaggagctccctcgactttttttataatttctttggttgataatgggtctctacttcttttttgagatgagacagcatagaagtttcctcggtcagctccagaagggagaaccctttttggataagtttagaatcgtctgtacaaatcccaatacggacatagcagatagcaagcctatcgtagcttttcttattcttggcgtcctccagtaaagtgtagcagatttgcttacacatgtttttatcttgattgtatagatagagtgtggaaaggtttagcaggattgctattcgcaagtcatataaatgttgatagtttttatagacttctaagcgttgcaagattttctcggattattgacaaataaacggatattctgatagacgattgccctagcggcttagtgtaaactttacaaatttggcttgtaatttttttataaaattcacttcagttacttgacagttattatattttcacttattatatagataaaaggatgggataggagtttaaaaatttgaaagcgctatccataatcataacgcataattttctccttttcgtgaaaaaagttaacgtaattttgaaatgagcttaataagaggtatgatgtaggtagaaaataaagataggagaaaaagtatgaataaaaaaatattttgtattctagtatgtattatatcattgattagtctagctataatctttccatggggctggtcgatataatgtaagggagcttgagttgttagtggaggataaaatgttaagagtaatagtagttattcaatctttagtaataatactgcttgctgttgctttattattatctcggaaaaactttgattcgttaaatgttgttcttataatgatgatcgtatcacaattgttgttattagtatatttgataaaatcagggaatcagtgattagctgttatttgaattaagtaaactgttaagcttcaagcagtaactggttttaaatatttaaaataagataaaggaaggaagtctaatttaggtaactaaacaaagcctgcgatcacttgttaggaaaccatcctaaccatgcttaataaaaaaggagaaaataaatggaactcgtattaccaaataattatgttgctcttgagcaagaagagatgatgtatcttgatgggggtggtgttggtcgtaactggtggaatagtagaggtagttttgcaacagttctggatgtagatttggccatctatagtggtggtgcaacaatttattctgcttatgcgataaaaaaagctatctcagctaatagaggggctattacgagaacattacgtagtttaataattaaacatgtaggtagtgcagctggccatttagtcaatactgcactaaacgttgcactaactgttactggattttcactaggtggagcaatcgcatatggggctgattgggctgacggtagcttagatggttatatttttgcttaaaatgaaacatttttttgcaggaattggtgaaataaactttgtaagttatttattgtatatatgtgtaggaatagcccctttttttcacgtatatataataggttctgaaatgaattttgtgaaaatagtgttatctattttgggagttatatttgtaagtatgttaactattgctcgaatttatcggacttttctataaagaatagtttggacttgaactgtatctaaaaacagaggttggtagattatcagcctctttcttgtcgttgaaaagagtgagatatattgacttttgaaaaaaatgtcataattgagttgggataaacctaaaagtaataatatagtagattgaatctggaatagtccgttatgactgttaaaatatttctagaaattaatttgactttcctaatcgatttgttcacatcttgtttcaatctactatactttctcgttaaaccgttcggtaattcatggtgacatggacacatagtagtaagcacactatgtggcttggcagatctaaaaactgttcccttgcgataagcctaataagcacaacatagggagttagagaagccgactctaatcaaccactttgggcagtagtggtaactgccccgtgctttttattttgagaaaatatggagtttgtcgttgaaattacttgattgtattttggattatcaagaaagattcaatggaaaaacatgtcaagtatcaacgaattataagtatttagagattttcaaagtgaatttttgcttgactgatttacatcatttatttgacttacacaaaatcacacgagattatgctagtcaaacaaaacctgctattcaagatggtgtttttattttagaagattttagaaatatcctatgtacaatgatgtaatcgaaaggatatctttatgtgagtttatcggcgatatcttctatatctaagctagcaagttgttgcatcgtagctaaggatttatctaaaaatactatgaaattggacgtcatattttttgaggataaaaataaaagatccgcagttttaggtttacgaagagacaaaagcggagtatttaaaccagttactctacattttacaagcgctaagaaatatgctaaagttcgtaaaacagatgtgaaagaaatgaaatggctataaagattgtccgcaggcttaagcttgcgttttttgttgtttaacgaaattaaaaaacaagctctctcatcggaaatgtttttataggaatgaaggaagatgatgctatgtttaaaaagagaatcgaaaagggcaaaagtagtatctttatctattttttggagtagaagcttatgatatagaaatttgtaataaaaatgtaatataaaacatttgacaaatatttacggggggagtatacttaatataattatagtctaaaaatgactatcagaaaagaggtaaatttagatgaataagaaaaaaatgattttaacaagtctagccagcgtcgctatcttaggggctggttttgttacgtctcagcctacttttgtaagagcagaagaatctccacaagttgtcgaaaaatcttcattagagaagaaatatgaggaagcaaaagcaaaagctgatactgccaagaaagattacgaaacggctaaaaagaaagcagaagacgctcagaaaaagtatgaagatgatcagaagagaactgaggagaaagctcgaaaagaagcagaagcatctcaaaaattgaatgatgtggcgcttgttgttcaaaatgcatataaagagtaccgagaagttcaaaatcaacgtagtaaatataaatctgacgctgaatatcagaaaaaattaacagaggtcgactctaaaatagagaaggctaggaaagagcaacaggacttgcaaaataaatttaatgaagtaagagcagttgtagttcctgaaccaaatgcgttggctgagactaagaaaaaagcagaagaagctaaagcagaagaaaaagtagctaagagaaaatatgattatgcaactctaaaggtagcactagcgaagaaagaagtagaggctaaggaacttgaaattgaaaaacttcaatatgaaatttctactttggaacaagaagttgctactgctcaacatcaagtagataatttgaaaaaacttcttgctggtgcggatcctgatgatggcacagaagttatagaagctaaattaaaaaaaggagaagctgagctaaacgctaaacaagctgagttagcaaaaaaacaaacagaacttgaaaaacttcttgacagccttgatcctgaaggtaagactcaggatgaattagataaagaagcagaagaagctgagttggataaaaaagctgatgaacttcaaaataaagttgctgatttagaaaaagaaattagtaaccttgaaatattacttggaggggctgatcctgaagatgatactgctgctcttcaaaataaattagctgctaaaaaagctgagttagcaaaaaaacaaacagaacttgaaaaacttcttgacagccttgatcctgaaggtaagactcaggatgaattagataaagaagcagaagaagctgagttggataaaaaagctgatgaacttcaaaataaagttgctgatttagaaaaagaaattagtaaccttgaaatattacttggaggggctgattctgaagatgatactgctgctcttcaaaataaattagctactaaaaaagctgaattggaaaaaactcaaaaagaattagatgcagctcttaatgagttaggccctgatggagatgaagaagaaactccagcgccggctcctcaaccagagcaaccagctcctgcaccaaaaccagagcaaccagctccagctccaaaaccagagcaaccagctcctgcaccaaaaccagagcaaccagctccagctccaaaaccagagcaaccagctccagctccaaaaccagagcaaccagctaagccggagaaaccagctgaagagcctactcaaccagaaaaaccagccactccaaaaacaggctggaaacaagaaaacggtatgtggtatttctacaatactgatggttcaatggcaataggttggctccaaaacaacggttcatggtactacctaaacgctaacggcgctatggcaacaggttgggtgaaagatggagatacctggtactatcttgaagcatcaggtgctatgaaagcaagccaatggttcaaagtatcagataaatggtactatgtcaacagcaatggcgctatggcgacaggctggctccaatacaatggctcatggtactacctcaacgctaatggtgatatggcgacaggatggctccaatacaacggttcatggtattacctcaacgctaatggtgatatggcgacaggatgggctaaagtcaacggttcatggtactacctaaacgctaacggtgctatggctacaggttgggctaaagtcaacggttcatggtactacctaaacgctaacggttcaatggcaacaggttgggtgaaagatggagatacctggtactatcttgaagcatcaggtgctatgaaagcaagccaatggttcaaagtatcagataaatggtactatgtcaatggcttaggtgcccttgcagtcaacacaactgtagatggctataaagtcaatgccaatggtgaatgggtttaagccgattaaattaaatcatgttaagaacatttgacattttaattttgaaacaaagataaggttcgattgaatagatttatgttcgtattctttaggtacctatcttatgatttcaggaaatgtcattaaaaaaacgactcattttctctaacttgaaaaatagattagagaaaatgggttgttttatttattatagttatttgaatgaagataagaagaaggtatactcacatcattcacataatctgtatattgactataagttttaaaaaacaatttttaagctcttccttgtcttctctaaccaagcgtgttataatgaatactgctcaagcgaccttcaatcgtgaagcacacacgaccttcaatcgtgaataaacgaatagatgggagacttaccatgagtgataactctaaaacacgtgttgtcgtggggatgagtggtggtgttgattcgtcggtgacggctcttttgctcaaggagcagggctacgatgtgatcggtatcttcatgaagaactgggatgacacagatgaaaacggcgtctgtacggcgaccgaagattacaaggatgtggttgcggtggcagaccagattggcattccctactactctgtcaattttgaaaaagagtactgggaccgcgtttttgagtatttcctagcggaataccgtgcagggcgcacgccaaatccggacgttatgtgcaacaaggaaatcaagttcaaggcctttttggactatgccataaccttgggggcagactatgtagcgactgggcattatgctcgagtggcgcgtgatgaggatggtaccgttcacatgcttcgtggcgtggacaatggcaaggatcagacctatttcctcagccaactttcgcaagaacaacttcaaaaaaccatgttcccactaggacatttggaaaagcctgaagtacgcagactagcagaagaagcaggcctttcgactgctaagaagaaagactcgacagggatttgctttatcggagaaaagaactttaaaaactttctcagcaactacctgccagctcagcctggtcgcatgatgactgtggatggtcgcgatatgggcgagcatgcaggtcttatgtactatacaatcggtcagcgtggcggactcggtatcggtgggcaacacggcggtgacaatgccccttggttcgttgtcggaaaagatctaagcaagaatattctctatgtaggacaaggattctaccatgattcgctcatgtcaactagcctagaagccagtcaagtccactttactcgtgaaatgccagaagagtttacgctagaatgtacggctaaattccgttaccgtcagcctgactctaaggtgaccgttcatgtcaaaggagaaaagacagaggtcatctttgcggaaccacaacgcgcgattacaccaggacaggcagttgtcttttacgatggcgaagagtgtctaggtggcggtttgattgacaatgcttaccgcgatggacaagtttgtcagtacatttagattgacaaattttctcaatttgctacaataataacagcaatagaaatgatggtcaaagctcatggatgttgcaggcttttttgtcctgcacttctttgtagttttgactgtttttgtgtcgtttaagggaaaggacaagaatgactcaacaagactttcggacaaaagtagacaatacggtttttggtgttcgggctacagccttgattgtccaaaatcacaagcttctagttaccaaagacaagggcaagtattacactattggaggtgcgattcaagtcaatgaaagcacggaagacgcggtagtccgtgaagtgaaggaagaactgggtgtcaaagctcaagctgggcagctagcttttgtggttgaaaatcgttttgaagtggacggcgtttcctatcacaatatcgagtttcattatctggtggatttgcttgaagatgccccgttgaccatgcaggaagatgagaaaaggcagccctgtgagtggattgacttggataagctccagaatatccagctagttccagtctttttaaaaacagccctaccagattgggaaggccaactaagacacattcatcttgaggaataggagagaaacatgacttatcattttactgaagaatacgatattattgtaattggtgcgggacacgctggggttgaggcttccttggccgctagccgtatgggctgtaaggtcctgcttgcgaccatcaatattgaaatgctggctttcatgccttgtaatccctctatcggtggttctgccaaggggattgtcgtgcgtgaagtcgatgccctcggtggcgagatggccaaaaccattgacaagacttacatccagatgaagatgctaaacacagggaaggggccagctgtccgtgcccttcgtgcgcaggctgacaaggaactttactctaaggagatgcgcaagacggttgaaaaccaagaaaatctgacccttcgtcaaaccatgattgatgagattttggtggaagatggcaaggttgtcggtgtgcgtacagccacccatcaagaatatgctgctaaggctgttattgtgacgacagggactgctctccgtggggaaattatcatcggagacctcaagtactcatcaggtcctaaccacagcttggcttctattaacctagctgacaatctcaaggaactgggtctcgaaatcggtcgtttcaagacaggaacccctccacgtgtcaaggcttcttctatcaattacgatgtgacagaaattcagccaggagacgaagtgcctaatcatttctcatacacttcacgtgatgaggattatgtcaaggaccaagtaccatgctggttgacctataccaatggtaccagtcatgagattatccaaaacaacctccaccgtgcgcctatgtttacaggtgtggtcaagggagtggggcctcgttactgtccgtcgattgaagacaagattgtgcgctttgcggacaaggaacgtcaccaactcttccttgagccagaagggcgcaatactgaggaagtctatgtgcaaggactttcaaccagtctgcctgaggatgtccagcgtgacttggtgcattccatcaaaggtttggaaaatgcagagatgatgcggacaggttatgctattgagtatgatatggtcttgcctcatcagttgcgtgcgactttggaaaccaagaaaatctcaggtctcttcactgctggtcagacaaatggaacatcaggttacgaagaggcagcaggccaagggattatcgcgggtatcaatgcggctctgaaaatccaaggcaagcctgaattgattttgaagcgcagtgatggttatatcggggtgatgatcgacgacttggtgaccaagggaaccattgaaccctaccgtctcttgaccagtcgtgctgaataccgtctcattcttcgtcatgacaatgctgatatgcgcttgactgagatgggacgcgagattggccttgtggacgatgaacgctgggctcgttttgaaatcaagaaaaatcaatttgataatgagatgaagcgcctagacagtatcaaactcaagccagtcaaggaaaccaatgccaaggttgaggagatgggcttcaaacccttgaccgatgcagtgacagccaaggaattccttcgccgtccagaagtttcttaccaagatgtggtggccttcatcggaccagctgcagaagacttggatgacaagattatcgaattgattgaaacagaaatcaagtatgaaggctatatttccaaagccatggaccaggttgccaagatgaaacgcatggaagaaaaacgcattccggccaatatcgactgggatgacattgattctatcgcaaccgaagcccgtcagaagttcaaactcatcaatccagaaaccatcggccaagccagccgtatttcgggagtaaacccagcagatatttctattttgatggtgtatctggaaggtaaaaatcgtagtatttctaaaactcttcaaaaatcaaaatgatacgtcgtcggcttcttacgaatgagttcaaagcttggctttgattcatctccagcctcccatagtttcccgaactatgggagctaactcaagttatgctttcgcttagccttctagtctgatttcgatttttattgatactcttcgaaaatctcttcaaaccgcgtcaacgtcgccttgccgtaggtatggctactgacttcgtcagttctatctacaacctcaaagcagtgctttgagcaacctacggctagcttcctagtttgctctttgattttcattgagtatgagttttaatctcaaaagaaagcatagagaaaaacagctccgaggacggggctgttttcttgctttattcttcatctggtgtgaggatcatcgggatgatgatcggttcacgttcggtattttcatagaggaaggggcgaatagcgttgacaatggcaccattgacagattgcacgctagcatccttatttttcagtgcgatacgaatggcattgaagaggatacgctggctttggcgaatcaagtcgccagactctctcatgtagacaaagcctcggctgaggatgtctggaccagatagaatcatctgcgatttgaagtcaacagttgcaactgccagaacgacaccgtcttcagatagatcgcgacgatctttgaggacagctgcgccaatttcaccgatacgatttccatcgacatagatatcttgggcgttgaaatgacctgcgatacgagctgagtcagcagtaagggcaagcacatcgccattgctcatgataaagatattgtccttctcaacaccagtatccactgctagtccagcgtggactttttgcatgcggtattcaccgtggacaggcatgaagtattttggcttaatcaagcagagcatgagtttttgctcttgctgaccaccgtgtccagatgtatggatattgttcactttaccgtggataacttcgacaccagcttcagaaatgatgttaatcagcttgttgacactagtagtgtttccagggatgggactagaagagaagataacggtatcacctggttgtaattgtacttgacggtgggttccgttggcgatacgagagagggctgccataggctcaccctgactacctgtacagaggataagaacttctcctgcaggataatctttgatttcatttggctcgataaaggttcccttaggagctttgatgtagccaagatcgattccgttgacaatggccttttccatagaacgaccaaagaccgcaatcttgcgtccagtcttaacagcagcttctgttgcctgctggagacggaagatatttgaggcaaaggatgcaaagatgatacgtccttcaataccttggataatcttcataatggactgaccaacgactttttcagagttggtaaaggttggtacttccgcatttgtcgagtcagacaggagacagagcacgccttcttcaccaagcgcagccatacgatgcaagtccgcaggttctccaactggagtaaagtcgaacttaaagtcacccgtacagacgattttcccttgaggagtatgaatgacaatccccaaaggctctggaatagagtgagtcgttctaaagaaagttgccttgagatttttaaaggtcaactcggtgttgtggttgatttcgtaaagtttggcgttgcgcaagaggccgtgttcttcgagtttcccacggatcaaagccaaggcaagcggtccagcataaatagggacatttgcttgcttgagtaggaacggaatcccaccaatgtggtcctcgtgtccgtgtgtgattaaaacagccttgacgcggtcgatattgtccacgatgtaagagtagtcaggaatgacatagtcgataccaagcaagtcatcttctgggaatttaatcccagcatcgacgatgataatctcgtcttggtattcaattccgtaagtgtttttcccgatttctcctagaccaccgatggcaaaaacgccgacttcttcaggtttaagagtgtaggccatattagaactccgtaatttcgaaggcgccagtttctttttcgtaatcgagcaatttgtcagacaagagttcgatatactcgatattgtactctgggcgattttcttcgacaagttggcgagcagtgatacggccctcaagttctgagctggcatcgatgtctaggtaaagcgtgcgtgttgtttcacggcgtgggctacgttcttttgtttcttgataaaaaactttgtaaatcatatagttcctttctatttacaggtcagcttattccaaacttttagcagatatttgcttgatttcattccattttgtgtctagattgaccttgattcgttacaattatttcaattataccacaaaatgaaaaattagtaaaagacggaaacgagaaagttaggggacgatttctttggtaagcgttttcaaaaataaagaaaatgtattatgttgataacggaagtgaaatttattgcttgtcataattccatatagattttaagtcaaggaggttgccctatgtataacttatttgcttttgctatcggagctcgcttggtagcttttattgtttttgttgcttgcgtttatgcggggaatcttctatttgccaaactggaacgacgacaaaccaagttcttgtggaaaatgacctttgtgactctctactcgctttttctcctcctcgtgacctatgtcgtttggtttgtattttactttgaattaaatgcttagatgccctgcttatgctggggttttttgtttgggaatgtagagatagtagatttacgacacgaaaattccaccccatctatcaagatgaggtggtctttgcatttttctaacatgacatgacaatggaattttcaaagcttattatttttatgggagtcattgttctgatcaaaaatagagttgaagcataaaaataaaacaatacaaacagataaatcgaatggtaaagggatggtagtaatgttcaaatcattgagaatgctgagcaaactgtaagagatgaagacaataaaatttatccttctaaaaatgtgtttcttatctagcatgacttaccaaactttttacgaaggtcttttccaatggtataacctgccataaataaagcgataccaacaccgacaccaaagccacccttgatttcttgcaattccttattagaaatttcacgataattgttcaaatctttcatcatattaatctcctcctaaaaaataaccagctgccaaaccagaacctataagtgctgttccacctgcaatagccttccaagatactgctactccaaagataaccaagggagcgagaccgccatcaatatctgataattcattttcagataaggataaaaattgattgtcaagaatgtcaaaatttgtcattgaactttcctccttttttcttgttcacttttatattcggaaaagaaaaggaaaagtgagcatttttttaaattatttttagttaagtgagggcactcttgtctgggggcaaagaaaattcccatgtgccagcttttgtagtataatagtaagcagacaaaaagataggaatgtgttatgaaagtattagcttttgatacgtccagcaaggctctttctctggctattttagaggataagcaggttcttgccgagacgacgattaatattaagaaaaatcacagtattactcttatgcctgccatcgattttttgatggcaagtttggattggacacccaaggatttggaccgaatcgtggtagctgaagggccgggtagctatacaggcttgcgaattgcggtagcaactgctaagaccttagctcacaccctgaacatcgagttggttggtatgtcgagtctcttggctctggtgccccatcaacaagaaggtttgtttgtccccttgatggatgcgcgtcgcaataatgtttatgcaggattttatgaaaatgccaaacctgtcatggcagaagcgcacctatcttttgaagaggtgctagaaaaagtcaagggtactagtcaggtaacctttgtcggagaagttggcccctttgttgagcagattcaaaaacacttgccaaggactgattacaaagaaacattgcccaatgcagctaatctagctcttttggcctgggacaaggaagcagactccttgcatgattttgtgccgaattacctcaaacgagtcgaggctgaggaaaactggctcaagaaccataccgagtctggcgagtcttacattaaacgcctatgatagaaatcaagcgaattcaacaacagcctgacctagctcaagccatctacgctgttatggcagctgtttacctagtcagtccttggactctggagcaaatccaagcagatctgtcccaagaccagacttggtatgcattggcttatgatggggcagaagtgattggatttctagctgtgcaggagaatctttttgaagcagaagtcctgcaaatcgctgtcaaaggagcttatcagggtcaggggattgcgtcagccttgtttgctcaattgccgacagacaaggaaattttcctcgaagtcagacagtcaaatcaacgagcgcaagcattttacaagaaagaaaagatgacagttatcgctgagcgaaaggcctactaccatgacccagtcgaggacgccattatcatgaagagagaaatagatgaaggatagatatattttagcatttgagacatcctgtgatgagaccagtgtcgccgtcttgaaaaacgacgatgagctcttgtccaatgtcattgctagtcaaattgagagtcacaaacgttttggtggcgtagtgcccgaagtagccagtcgtcaccatgtcgaggtcattacagcctgtatcgaggaggcattggcagaagcagggattaccgaagaggacgtgacagctgttgcggttacctacggaccaggcttggtcggagccttgctagttggtttgtcagctgccaaggcctttgcttgggctcacggacttccactgattcctgttaatcacatggctgggcacctcatggcagctcagagtgtggagcctttggagtttcccttgctagccctcttggtcagcggcggacacacagagttggtttatgtttcggaggcaggagattataagattgttggggaaacccgtgatgatgcggttggtgaggcttatgataaggtcggccgtgtcatgggcttgacctatcctgcaggtcgtgagattgacgagctggctcatcaggggcaggatatttatgatttcccccgtgccatgattaaggaagataatctggagttctccttctcaggtttgaaatctgcctttatcaatcttcatcacaatgccgagcaaaagggagaaagcctgtctacagaagatttgtgtgcttccttccaagcagcagttatggacattctcatggcaaaaaccaagaaggctttggagaaatatcctgttaaaatcctagttgtggcaggtggtgtggcagccaataaaggtctcagagaacgcctagcagccgaaatcacagatgtcaaggttatcatcccccctctgcgactctgcggagacaatgcaggtatgattgcctatgccagcgtcagcgagtggaacaaagaaaacttcgcaggctgggacctcaatgccaaaccaagtcttgcctttgataccatggaataaagagtggctctttgtcaagtgtagtgggtaggcgaaaagctgcaatctggagagtacgaaattcgtactctcttttttgatgttcaaagtcatcaaaatccgttttttaaaattgttaaagttccggaaaccaaaggctttgcgcttgataatcttaatcaaattattggtcgcttcaagtttagcgttggaataaggcagcttaagtgcgttgataatcttatctctatcccttaaaaaagtccaaaagaccgtttgaaaaagcggatgaaccgttggcagttcttgctcaatcaatccaaagaaatggtcggcattcttctcttgaaaatgaaagagcaggagttgatagagttcgtagtgaacctgtaatccctcagagtaagaaagcagcttatctcgtacttcccgatgggttaagtgcattcgaaacgtgggctgatagaatcgtttctgacagagcttgaagctatactggtgtagtaaatcagtccagtggactgatttagcccgagcctagaaacgaaaaagcgagggttccaaaagcgcttgagcgcccgatactccaaggattttcggtcaaattggttcatgatttggattcgtactcggttcatagctcggctcagatgttggacaatgtggaagcggtcaagaacaatcttcgcctttggaaagagttgcttagcgagccgataataagggctgtacatgtccatggtgatgacctcgaccagctcccgaacctctctctgatagcgttggaaatggtttcgaatcaccgcatgagttcgcccgtctaaaattgcgaggatggatttggactcaaaatcttgggcaatgaagctcattttgctctttttgaagctatactcatcccaactcataacttttggcaacttggtccaatcggtttcaaacttaaattccctcagttttcggatgacggtggaagttgagaccgccaatctgtgggcaatctcagtcatagactgcttttcaaggaggagctgagcgattttttgtctcaccatgttggaaatctggcaatttttcttgacaatggatgtttgagaaacgaccaccttaaggcaattcttgcactgaaagcggcgctttttgagatgcagtaccgtgggtaaaccctgacagtcgagaagcggaattttagaggctttctggaagtcgtatttgatcatcttcccttgacaatgaggacaaggaggagcgggggaatccaactttgcctgaacgactagatgggtttggtatttcagaacagacaagattttgatatttttgtcttccaatccgagcaaatctgtggtattcttaagttgttccatatgaaccctttctaatgagttggttagacgcttttcattataggtcatatggggctttttttctacaagaaacgaccctataattcctggggtgggattacccactacagaaattatagagccaaaacattccaaagtcttgtctgactctggaatgttttctgttcacagttgttttgtaactgcctaataagtaaccgcgctataacgaggtatctaccgagattgtcaattctccagtatactgttataaaaaacaaaactggaggatttttttatgtccccccatcgtcccatcgactgttccgtagctgcccaataacggagtatagtcggctgaaacaagaataggacaaaagtgcctcaagaaaagcatcgtaatttgacaatattattctgagatgtttttgatgtaagcccatattttctcaatgggattatactcgggtgaataggtaggaagtggtaacagtctatgccctgctccttacacatgttcattctgtgaaaccttgcattgtccataatgataagggatggtgtatctaaagtaggtagtaagaatttttggaagcaagcttcgaaaaagtcactcgtcatcgtatctttataggtcatcggagccatagtatattgaaacaaaaaagggcattagtacttctataacagtatcgcaatctctggtgtgcgttgtctcgatcttaattcaaataattatatcttcttccagagagactaactgcctgctcaaggctcgatcatattcgagataaaaataggtctcaacccctgtctcataaatataaataggagtcaggtagcttaagtgattcaattctttaaggaaccgatttactttttctgggtcttgttcgcagtaggtacggctcttttttagactatatcccatagcctttagagcgtaatgaatagttgttggaggacagttgaattcagcagctatttcagtcaaataagcatcgggatgagtttcaatatagatttttaatttatctctatcaattttttcaattaatagtggaagttttcttgaagttagtgtattgaaacgtttttatacagtgctaaaatttgaagtgtagtgcagatggatttgtaatagtattatagcaattctttggagaaggtcgagacaagataaaataggtatctttgagatataagcatgatttactataaaattattgagttattcataaaaatttctctatcaaatatcataatgcgtcgtttaaggagatggttacaatgcaatatagttgtggaaaaataaatattaatatccctgatggatatggagacattaaggatatagtgttttcggctcatattatagttaggtataataatggacattgtggaggtatagatccgcatataattggactttgtaaaaagcagatcagaaggatgtctctatatcctattttgataattgtatctagagattcaaaggttattgatgattataaaaatttagatattgcctatgttgattgtactcaatgttcaaataattttgaaactgccttacacgttaaaaatattttaaaattattaaaaatccaacttatacactgtcatggctactcaactaattattttttatatatgttaaaaaaacttgacaagaatggatttggaaaggttaagacagtgataacatgccatggatgggttgaatataacttaaaaaagaaattcttgacttattttgatttttggacatattctatgggagatgcttttatttgtgtatctgaaactatgaaaaaaaagattggagagtataataaaaaataagaagatagttgcaataaataacggaattaatgtatcaaatagcgatttagatgtagtaggtgttcaagactttaaaaaagaattttgtattccaaataacaaaaaatcatttgttatgttggaaggttggatccagaaaaaaggccggatagattccttgaatttgcagaaaaattatttttagtcagagaagatgtgatttttattatggctggaaatggtagtatgtgggctgctttgaaagaaaaaatttgccatttgaaatgtagagataatttcaggttacttggtgaaatctatccagctactatagtttaccaaatatcggatttattgtatattccttctgatacagaaggaatacctatgtgtgttttagagtcaatgtcacaaggaactccggttttagctagtaatgttggcgggttaagtgaaattattgaacatagggttgatggatttttatttgagaaggaagatgttgagggagtgtgtgcttgtgctaattttttactcaatgattctgagtatttgaaatatataggtgagaatagtaaatcaaaaataagaaaacatttttctgtgcaaaaaatgtttgtagaaaccatgagagtatatgatgaattattagagaagagtagtcatggataggaatatagatcaagaattagtaagtattataataccaacacataataggtatgaatctctgattagagctgtgaaaagttgtttacatcaaagttataaaaatatcgaagttataattattgatgataattatagtaatgtaaatttaagaaataaaattatccatcaatttggctataccaatcatagaattaagttaattttaagtaatgaagatttaggtgcaactaatgccagaaacataggtatcaaaaattctagaggtaagtatatatcatttttagacgatgatgatgaatatatgccagatcgaattttaaagttgatggcttgttttaaaaagagtagaatgaagaatttagctttagtttgtagttatggaataataatttatccaaatggtacacgagaagaggagaagaccgattttgttggaaatcccttgtttgttcaaatggttcacaatatagcaggtacgtcattttggttgtgtaaaaaagaggtgctagaattaattaatggttttgagaaaatagattcacatcaggacggtgttgttttattaaaactacttgttcaaggataccaaattgatatagtgcgagaattcttggtgaattactacgctcacagtaaagaaaacggtatcactggagtgacacaaaaaacaattaatgcagatgaagaatattataattactgtaggaaatattttaatttattgagtttcaacgagagaatattggttacaaagaaatattattctttaaacataaagcggttactattaataggagacaaatgcaaggctttaaaagtaatcaagaaggcaagagaagaaaaaatttttaacgaatttcttttttgaaatatatgttattatatcattttggttttttctattgtatatatgaaaactatgttcaattaaaatttagaaagtgagaaactattgtgtatactattataaaatcaaatataaaaaaatttagtttattaacgatatttattgttgctggtcaattattgctaatttatgcagcaactattaatgctctggtgttgaatgaattaattgcgatgaatttagagcggtttttgaaattgtcaatctaccaaatgattgtctggtgtgggataatattccttgactgggtagtgaaaaattatcaggttgaagtgatccaagagtttaatctagagattcgaaatagagttgccacagacatctctaactctacctatcaagaatttcatagtaaatcatcaggaacatatctttcgtggctaaataatgatgttcagactttaaatgatcaggcgtttaaacaactttttttagtaataaaaggaatttctggtactatatttgcagttgtgactcttaatcactatcattggtcattgactgtagccaccttgttttcattaatgattatgctacttgtaccaaaaatctttgcatcgaaaatgcgagaagttagtctaaatttaactaaccaaaatgaagcttttttaaaatctagtgagactatattgaatggatttgatgtgttagcgtccttgaatcttttatatgtattgcctaagaaaattaaagaagcaggaattttattaaagatggttatacaaagaaagacaactgtagaaacgttagcaggcgctattagcttctttctcaatattttttttcagatatctctcgtttttttaacaggctatcttgcaataaaaggaatagtgaaaattggtactattgaagcaataggagcactaacaggtgttatttttacagcgctaggtgaattaggaggtcaattatcctctattattggtacgaagcctatttttttaaaattgtattcaattaatccaattgagtcaaataaaatgaatgatatcgaaccaaatgaggtgaatagagattttccgttatatgaagcaaaaaatatttgctataagtatggagataaagaaatattaaaaaacttaaatttttgttttcaacgtaatgaaaagtatttaattttaggtgaaagtggaagcgggaaatctacattattaaaattattgaatggctttttgagagattatagtggagaattgcgattctgcggggatgatataaaaaaaacctcctatttaaatatggtttcgaatgttctatatgtagatcaaaaagcttatttgtttgaaggtacgattagagataatattttattggaagaaaattatactgatgaagaaatactacagtctttagagcaagttggtttgagtgtaaaagattttcctaataacattttagattattatgttggtgatgatgggagattactgtcaggagggcagaaacaaaaaattactttagctagagggctaattagaaataagaaaatagtattaattgacgagggaacttctgctatcgataggagaacttcgttagcgattgaacgtaagatattagatagagaggatttgactgtcattattgttacccatgctccgcatccggaacttaaacaatattttactaagatatatcaatttccaaaggattttatttaagaatataggggagggaaacatgagattctattgtgaagcttatgaggtaattactgaagagaaaaaagtatcatttttttatgtagatgagaaacccttaaggtatctgttatttgactatatatttctactagttctagctaaaaaaaaatatcccaatcttatgaactgcaccccaaaagttagatttattctgtctaacttttggggtgcagttcattttgcatagttttggcattcatcctagatatccatataaaatgtctgagattgttgaaatgtctaaaaaaatatcagatctaaacgataaaaaagaatttcacaaaaagaactgtgagttgaggtttcaagatagtgttcttgataacataaatagtgtcccgggtacaactcatttatttagttgtttaaatattcaaacattagtaaaaattattttatatatttttcgatacaacagttgtatgaaaatatttaattttagagataaagagcttatcttttttaataagattgtaaatgggctgatacaaaatattgaggagaatttagaggatgatattgaaaggatattgaaatatttatatatatgtttatttaacgaaatattcattattaagaataaggtgaatttttttgatgatgtggaatttaatcagacacttagtgagtttttagataaattgtagagggaatggttatgagtaacaatactaagtatatctttttatctccacatttagatgacgcaattttttcctgtggtgattatatttcaaaattaacttcagaaggagaaattgtacttgttattactatattttctggttaccctttgagccaacagctacagccctctgctaagcaatttcataagttgtgtaaccttgggaaatatccgattgaagaaaggaagaaagaagacaggttagcttgtgaacgtctacaatgtgattttagacacttatcgtactatgaatgtctctataggaaagatagaaatggcaattttctataccgtcatatctatagtgaattaaaaaatgaggacacattaaagaatgatatcataaaagagctgttaatgcatttagacgacaaatgtgtcgtatattgtccgctttcacttggtgaccatgttgctcatgtttttgtgaatagtattggaagggcgcttgaatttatgcgttataaagtaatatattatgaggacttcccatatgtaagtgatagtagtatggttagttatatgggaaaaactaaagaattaaaaatgtatcaagaggaacttgatgaaaaaaattatattgatagaatatcatcaatattgtgctataaatctcagattttgataatctggaaatcagttgaaaaacttttaaacaatattaaagagttgtatttaaggaatggggcagcttattctattagattttggattaagaaataaggaagtagttttatgaatatagcagtaattggtttggggcatgttgggctggcctacgcgttactatttgcatctaaatataaagttgttgcatatgatatagattctgtaaaaataaataatttaaaaaagggcattcttccatctaaaaatgaagagcttatgaagtttttttgcgagaataacttaaatattactttttttgatacattttctgaaattaaaaataatattgattattatattattgcgcttccgacagattatgatgagaaaattggtagttttaatacatatgaaatcgaacaaacggtatcgaagattctgagggtaaaacctaatggaaagattattttaaagtcaacagttccgatcggcttttcaaacaaattaaaaaggctgtttgatacaaaaaatatcatttttgtccctgaatttttgagagaaggttgttctatatatgataatttatatccaagtcgcatagttgttggagatgagacagttgaaggaagaaaaattgcagagttgttcctttcgattagtactcatagtactgccaatattaaaaatgttatgttagtttctcctactgaagcagaagcaattaagcttttttctaacacattcttagctctccgtgttgcttttttaatgaactagattcttttgctgagaggagaagcttaaatgctgaagttgtaataaaaggtgtttgtttagatccaagaattggaaatttttataataatccttcttttggatttggaggatattgtcttcccaaagatactaaacaattaaaaaaagaatttatagaaataaatgccccagtgatagaagcgattgatatttcaaacacaaatagaaaacagttcatagttaaacaaatattggaacgaaagccaaagatagtaggaatatataaattggggatgaaatataattcagataattacaaagagtcagctattttaagtataattaatgaactattgattgtcggtataaaaattttagtatatgaaccaaatttaaacgttagtatagataacgtaattattgaaaagaattttgaactatttacaaaacaaagtgatctaattgttgcaaatagatgggataggggccttgaagcttataaagataaagtttacacaagggggatctggataagagattaactattgatattaaaaaggcaataatttataaaatttgtacaaaaaaatgttaaattttcacattttcatagtatactgtttaatagaaagtaggttctttgtaaccgctccattataaaatcctttcactcttccggtatactattaggaaaaacataactggaggatattttgagctcacacctcatcgttccagtggctgttccccaagctcgtgtactgcccaaaaaagttagacattctatttagaacgaggattgagttctgtattgtacaaggctcggtccttttagagtcagcttaaggctggcttttttattttttctaactatcagaatattttgacaaatgattgtaaataatgatataatatgcaaaagctaggaggtggtcagatgattgagagaatggaactgggggaattttacaaggaattacgtttggcgagaaagctcaagcagtcagatgtggcttgtgagggtctaacagcttctcagttgtccaagtttgaactagggcagtctatgctgtctgcggataagttgattctagctatccaaggtataaatgtgacctttgatgagtttgggcacaagctcaacaactatcaagaatctccacatatgcgaatcggtcgaaaggttgtgaatcgctttgcccatcaggatatagctgctttagagcagctattggaggaagtcgatcaagaacagatggcgcagacctatcgtcgtttgaatgccatcgtgattaaagatgccatccattcactaaataaaagctacccactagcagaggaggatagcgagtttttgaccacctatctctatgctatcgagtcttggacctggtttgaactctatctcttttgcaataccatgcccttcttgagcaatcaagatctgatttttttatcaacctccttactcgaaaaatccaaagaatttaaagagttagtacacaatcgattgtatatgaagcaaggactcttaaatatcttatcagaactcatggagcgaaaacttttctcctacatcccaatcttcgaagccgagttggagaggatgttacgaccgtatgatgtttttgaaaaagtatcgtggcaatttttaaagaagatgagtgtctttcttcaaacaaagggaagcaatcaaaaagagattgaacgctttatccaatctctgcaggtattagaaaatccacaattaatagccctttttgaattgcgttttcagcaatataaagaacttatagattagttagaaatggcaaaataataataatctcagcaacgattttcaataatgttaaaatttgtttcttcatatttctccactcctcattagtagtaactttattataccagagaagtaatcaaattcaccaaaatcgcaaatctgaaatttctataagaaaaaatatcaaatatgcgattttctaaaataagccaatgttcgtgttatactgtacttgtaaagcacttgaagcaaatcctaggtcgcagaagtggtttacaaatgaagataattgaaggagtgtaaaagatgttaaatttacaatttgcagaaacaatggaattgacagaagctgagttgcaagatgttagaggaggcaacctcgtaaattctatgggaggtggtggaagaagtggtatatctggttggggcgtcccaggaatttaccctggttggggcaatcaagggatgagtcctaatcgtggagcttttgattggactatagatttagcagatggattgtttggccgccgtagaagataggctcttataggagataataggatgaagaaaatgaaagaagtgaaatttcacctagcaactggcttgttgattttgacttattacctcatttttaatgtcacatcagacttagattttatggttgctttgtctgataatatgtactatgtgttccaagttttattggtacttattctgggaactatagctacaattgcttttgtcaaaagtgaacattggaaagagtgtggtcgtttccagtttcgttggtcttacctgggtgttttccttctttcttttttcttattgttcgtgtgggcaaatctaacaacctatatctttcctcgtacccagaatggaagtacagtcgtagaagtagccaccaatttaacaggaattagctattttgttacgcgaatactttatactagtattatcgcacctgtatcagaagaggttgtttgtcgtggtcttttgatgacaagtttatctaaagttaagagatactatcttgatgttcttgtttccgctgccatatttggcgctatgcatgttttgcagtatggttggataacgacagatttcataaagtattttggaatgggcttgatattttgtatgatgtttcgctacacccgatccatctattgggctatagctctgcatgcttcatggaatagtttcttactcattgttactttattggtatttggatattagaaaggtgatatatgaaaaagataatctcacaccgctactttattatagtttttctactagttattgctgaccagaagttcagtgttctagttttacgcagcgaccttgttactgggctatctgactttgcctattatctgtcggatatgatgttgaattttcttgtggttttatttgctcttattgctatgatttggtcggggaaatggcagaaaatcaatagtagaaagtttaaaggatcctatcttttctattccttcctagctctgcttgcttttgttgtttggaatttcgttaccttttttcttttcccacctactcgaaatgaaatttcttatcaacatgctgctccgacttttacaggggctacagcatttttgatgtattttttttatcctgtgattgcaggtcccatttttgaagacatgatttatcgtggattagtgatgactgctctggaaaaaggaaagaaatgggggctagatgtacttggttccgctgttttatttggggtctcgcacattagtaatcacggttgggtcttgacagactttgtcttctatatgggtggaggtcttatatttgcagtcttatttagaatgacaaagtcaatttattggcctattggactgcatatagtctacaatggcattggtcagcttttgatgttactgtaattttggttgttagtagtatcgcggtctatccttggggaaagattcccatttgaacttaagaaggagttgtgatgaaagtatttcttcaaaatagagattttaggcaattaactatcaaccagtggatttcaacgcttggggatacgattttttatctggccttcctgaattatgtggcagatgcatcttttgcccctttggcgattttactcatcacgatttcagaaaccctgccccaagttctacaaatctttctgggagttttggcggattttcaacatcatcgtgtcttgaaatacacagtcattagttttgcaaaatttttgctttactctatagtgtctttatcactttcagggcagtctttctccttgttgctagtagcatttatttgtctgattaacctcttgtctgacacattgagttatttttcaggcgccatgctcactccgattttcattagaattattgggcaagaccatctggcagaagctattggctttaaacagtcaactgttagtttagtgaaaacaatcagtaatatcctaggaggagtcttactaggcattctatccatccagtttatttccttactgaacgctcttacctttttaatcgcatttttaggtatcctcttcataaaaactgacctcttgaaagtagaaaaaacgattagctatcaagaaggactctctgtaaaatccttttgccagcatttgctccaatcatcgaaattgatatggaatatgaataaggtgctcttggttttgtttattatctctactagtcaagcagtgataaatgttacggttcctatttccactctatttttaaggaaccagccctttttgaatttacaaactggtcaatctcttgccttgttagccacactagaattatcagccctgattgtcggaagccttgtaagtggctatctgcaacataccatttccataaaaacagctctctatgcctcacttgtcatccagttgcttcttctagtaggatttgccacagttcgttttgactggattctcatctttagtaccttggatgcctttttcgcaggtgttctctctcctagattgcaagaactcgtttttaaacaaatacctgaggagtcaatgggagcagttcaatcctctatcggtgccattacggttgttttacctagcttatttacaatagctttggtaaccattgctactagctttggaactctggcagttagctttgttttattgctatttcttctagttgcctttgttatgcttctgaatattcgtgaaagtatttagtggagaatttctataatatatgtttgagactggattgccagtctttttatgatggtcaaaatcaacagacttttttctcttttctgaatgtgttataatagactgaatctaaaatagtacgaaacaattgctaaaacatttatagaaattaattttactttcccaatcgatttgttctcatcttatttcaatctgctatataatagtccatgctgtggttggattcttttcagcctacttgtactcttcgaaactctcttcaaaccacgtcagcttcactttgccgtaggtatggttactgacttcgtcagttctatccacaacctcaaaacggtgttttgagctgacttcgtcagttctatccacaacctcaaaacagtgttttgagctgacttcatcagttctatctgcaacctcaaaacagtgttttgagcaacctgcggctagtttcctagtttgctctttgattttcattgagtattattaagacaatatgaggagaaagatgaaagaaaaaggattttaggagggggcgcaggcagccatgccaacggctcttggctatgtcagtatcggcctggcctgtggaattatcggtgcgccctatgtgacacctgttgagatgggcttgatgagtctctttgtttatgctgggagtgcccagtttgccatgttggcactgattgtggttcaagctcctgtggcagctattgctatgacggtttttctaatcaacttgcgtctctttttgttgagtttacacgcatcgacttatttccgtcataccagtctttggtacaatatcggtatgtctagtatcttgacagatgagacctatggcgttttgatgggtgaattggcccatacagacaaggtaaatcctatgtggatgcacggaaacaatcttaacagctatgtggcttggtttgtggggacagtagtcggaacggctctgggtggcctgctaccaaatccagaaatctttggcttggattttgccctggttgggatgtttattggtatttttgcttcgcaatttcagattatgcaaagacggattcctgtccgcaatctgctcattatcctagcagttgttgcggtgtccttctttttgctcttgacagtgatgtctcagtcactagctgttctgtttgcgacgctacttggttgtagcatgggggtggttttagatggtcagtaagtatcttttattagcagttattttctctggcttggtgacttggattccccgtatgattcccttcatcttggtcaagtataagggcctgcctgcgattgttgagcgttttttgaagtttttgcctgtttccattatctttgccctgattctttcaagcgtagtgacaggtaaggttggcagtcttcctcaaatcaaatgactggacttcttagccgtctttccaacagcttgggtagcctttcgctaccgcaatctagtcggaacagttctctttggagtggtcttgattgccatcttgcgtttggtcttttaaattacccataaaaaaaacttatcacagagatagatatcatataatggcgtaaatgctctttttctgttaagattataaggtattctattttggaggaaatgacatgaaaaaaatcgttaaatactcatctcttgcagcccttgctcttgttgctgcaggtgtgcttgcggcttgctcagggggtgctaagaaagaaggagaagcagctagcaagaaagaaatcatcgttgcaaccaatggatcaccaaagccatttatctatgaagaaaatggcgaattgactggttacgagattgaagtcgttcgcgctatctttaaagattctgacaaatatgatgtcaagtttgaaaagacagaatggtcaggtgtctttgctggtcttgacgctgatcgttacaatatggctgtcaacaatcttagctacactaaagaacgtgcggagaaatacctctatgccgcaccaattgcccaaaatcctaatgtccttgtcgtgaagaaagatgactctagtatcaagtctctcgatgatatcggtggaaaatcgacggaagtcgttcaagccactacatcagctaagcagttagaagcatacaatgctgaacacacggacaacccaactatccttaactatactaaggcagacttgcaacaaatcatggtacgtttgagcgatggacaatttgactataagatttttgataaaatcggtgttgaaacagtgatcaagaaccaaggtttggacaacttgaaagttatcgaacttccaagcgaccaacaaccgtacgtttacccacttcttgctcagggtcaagatgagttgaaatcgtttgtagacaaacgcatcaaagaactttataaagatggaactcttgaaaaattgtctaaacaattcttcggagacacttatctaccggcagaagctgatattaaataatttcttgaaatcatccattctgagtaaggtgggtggtttctcagtttttagggatatagttttaaactatatatctgactatctaataacaatttgtgaaatcaaacaaattgtgagatactagtacggtattatttttaaggagaaagaatcatgaaaatcaaaaaatggcttggtctagcagcccttgctacagtcgcaggtttggctcttgcagcttgcggaaactcagaaaagaaagcagacaatgcaacaactatcaaaatcgcaactgttaaccgtagcggttctgaagaaaaacgttgggacaaaatccaagaattggttaaaaaagacggaattaccttggaatttacagagttcacagactactcacaaccaaacaaagcaactgctgatggcgaagtagatttgaacgctttccaacactataacttcttgaacaactggaacaaagaaaacggaaaagaccttgtagcgattgcagatacttacatctctccaatccgcctttactcaggtttgaatggaagtgccaacaagtacactaaagtagaagacatcccagcaaacggagaaatcgctgtaccgaatgacgctacaaacgaaagccgtgcgctttatttgcttcaatcagctggcttgattaaattggatgtttctggaactgctcttgcaacagttgccaacatcaaagaaaatccaaagaacttgaaaatcactgaattggacgctagccaaacagctcgttcattgtcatcagttgacgctgccgttgtaaacaataccttcgttacagaagcaaaattggactacaagaaatcacttttcaaagaacaagctgatgaaaactcaaaacaatggtacaacatcattgttgcaaaaaaagattgggaaacatcacctaaggctgatgctatcaagaaagtaatcgcagcttaccacacagatgacgtgaaaaaagttatcgaagaatcatcagatggtttggatcaaccagtttggtaataagaaacagggaggtgggagagaaaattccacctcttgcttttgtatagagtatagattgtaaagaagactattcgttcatagaaaggtagagagaatatggtttttcctagcgaacaagaacagattgaaaaatttgaaaaggatcatgtagcccagcattattttgaggttttgcgtaccttgatttctaagaaatcagtctttgcccagcaggttggactcaaggaagtcgcaaattatctgggtgagattttcaagcgtgttggagctgaagtggagattgatgagagctatacagcgccctttgtcatggcacatttcaagagttcgcgtccagatgccaagaccttgattttctataaccactatgacactgtgccagcggatggggatcaggtctggacagaggatccttttacgctttcggtccgcaatggcttcatgtatgggcgtggggttgatgacgacaagggtcatatcacagctcgcttgagtgctttgagaaaatatatgcagcaccatgatgatttacctgtcaatatcagctttatcatggagggagcggaggaatcggcttcaacagacctagataagtatttggaaaagcatgcagacaaactccgtggggcggatttgttggtctgggaacaagggaccaaaaatgccttggaacagctggaaatttctggtggcaataaggggattgtgacctttgatgccaaggtaaaaagcgctgatgtggatatccactcgagttatggtggtgttgtggaatcagctccttggtatctcctccaagccttacagtctcttcgtgctgcggatggccgtatcttggttgaaggcttgtacgaagaagtacaagagcccaatgaacgagaaatggccttgctagaaacttatggtcaacgaaacccagaggaagttagtcggatttatggattggagttgcctctcttacaggaggagcggatggcctttctaaaacgtttctttttcgatccagcgcttaatatcgaaggaatccagtctggttatcaaggtcagggtgttaagactattttacctgcagaagccagtgccaagctagaggttcgtctggttccgggcctagaaccgcatgatgttctggaaaaaattcggaaacagctagacaaaaatggctttgataaggtagaattatactataccttgggagagatgagctatcgaagcgatatgagcgcaccagccattctcaatgtgatcgagttggccaagaaattctatccacagggcgtttcagtcttgccgacgacagcggggacaggacctatgcatacggtctttgatgccctagaggtaccaatggttgcattcggtctaggaaatgccaatagccgagaccacggtggagatgaaaatgtgcgaatcgctgattattacacccatatcgaattagtagaggagctgattagaagctatgagtagagatattatcaagttagatcagatcgatgtgacttttcaccaaaagaagagaaccatcacagcggttaaggatgtgaccattcacatccaagaaggggatatctacggaatcgttggatattctggagcaggaaaatcaacccttgtacgggtgattaatctcttgcaaaaaccatctgcagggaaaattaccattgacgacgatgtgatttttgacggcaaggtgaccttgacggcagagcagttgcgtcgtaaacgtcaagatatcggaatgattttccagcattttaacctgatgagccaaaagacagcagaggagaatgtagcctttgcccttaaacactctgaactcagcaaggaagaaaagaaggctaaagtagctaagttgttggacttggttggtttggcagatcgtgctgaaaactacccttcacaactatctggagggcaaaaacagcgtgtggcaattgcgcgtgccttggccaatgatccaaaaatcttgatttcagacgagtcaacttctgcccttgatccgaagacaaccaagcagattttggccttgttgcaagatttgaaccaaaaattaggcttgactgttgtcttgattacgcatgaaatgcagattgtcaaagacattgccaaccgtgttgcagttatgcaggatgggcatttgattgaagagggtagtgtgcttgaaatcttctcaaaccctaaacaacctttgactcaagactttatctcaacagctacaggtattgacgaagccatggtcaaaatcgagaagcaagaaatcgtggaacacttgtctgaaaacagtctcttggtgcaactcaagtacgctggagcttcaacagacgagccacttttgaatgaattgtacaagcattaccaagtaatggctaatattctctatgggaatatcgaaattctcgatggtactcctgttggagaattggtggtggttttgtcaggtgaaaaagcagcgttggcaggtgcccaagaagccattcgtcaagcaggtgtacaactaaaagtattgaagggagtacagtaagatggaatcattgattcaaacctatttaccaaatgtctataagatgggttgggctggtcaggcaggctggggaacggctatctacttaactctttatatgacagttctttccttcattatcggaggcttcttggggctagtggcaggtctctttctcgtcttgacagcgccaggtggtgtcttggagaataaagtcgtattctggattttagacaaaattacctcaatttttcgtgcggttccctttatcatcctcttggcaatcttgtcaccactttctcacttgattgttaaaacaagtatcgggccaaatgcagcccttgtcccactttcttttgcagtctttgccttctttgcccgtcaggtgcaggttgtcttggctgaattggatggcggtgtcattgaggcggctcaagcgagcggagcgactttctgggacatcgtgggtgtttacctatcagaaggtcttccagatttgatccgtgtgacgactgtgaccttgatttcccttgttggggaaacagctatggccggtgcggttggagctggtggtatcggtaacgtagccatcgcttatggatttaaccgctacaatcacgatgtgaccatcttggcaaccattattatcattttgattatctttgcaatccaattcttgggagatttcttgactaagaaattgagccataaataaaaaagagccgcgtggctctttttaactgatcagattttctgggcaaattttttactcaaggcttgtccaatcaaggcacccactagggctccgatgacaatacttgcgataaatagaaggacagttccagggtttggagcgaccatgatacggtcgatatattcttgggattttcctcttgccagaagagtagccatataggctttgggcgcaatccacataagcaagattggtcctgttgtactaaaggcgaaaataatgaaagaaaggaagttctttgttttgtccttgtattttcctaaatgagctactccatctgctaggaggccacagataattccaggaaggaaggaaccagcaccgtgtttagttcccaagaaaaagagggcaatgacaaggccgatagtggtaatggctccaaagcgcggaacttttgcgactaggatcatatagacgctaccgccgacaagggcagtaaaggcaggcgcataaaacatgtttccagtttggtcaaagagattgcccaaaaggacaccaatccccatgcagaggaagtaaagaactgcaaaaagcagtgtagttaagatagatttcttcatgaattgtctcctgataattttttcacaattctcattttatcatggtttggtgggattgtaaatggatactagaagtttttgaaaacgcttgaaatatgatataatggtttcatagttatttttaggggaatatcatgggtagatttttagactttgtctttaatcgtttctttttagggatgattgcgacagccttcttttggctattaactttagcaggagggattatccttggtctagcgccggctagtgccaccttgatgagcttatatgcagaacatggttatagctttcgggaatacagtttgaaggaggcttggtctctttacaagcaaaattttgtctcaagcaacctgattttctatagctttttaggtgtgggtctagttttgacctatggtttgtatctcttggtgcaattgcctcatcagaccattgttcatttgattgcgacccttttgaatgtcctagtagttgccctgatctttttggcttatacagtatctttaaaattacaagtttattttgccttgtcctatcgaaatagtctcaaattatccttgattggcatctttatgagtctagcagctgtggctaaggttctccttgggactgtgctacttgtagcaattggttattatatgcctgccctgctattttttgtaggaattgggatgtggcatttctttatcagtgatatgttggaacctgtctatgaaatcatccatgaaaaattggcgacaaaatagaatgaagcagttttggctacatacgcttctaagaacctatagttcagtgatgatcattatcattgcgagttttgcaatcttactctcttacgctgactgggattcacgtgaaaaggaagcccagagagtagcccagcgtgtaactgctagaacagtgagtgaaattgaatattaccatagagagtcaacccagatagctcaggctttagttgaaaatcaagctcgtatcgagggaatctataaatactttagccttagcatgccagactatttttactggcaattagagcggaaagcttcgccttatatatcagtctctctgtatgaaaatgttgatgacctctatgttcgaaatgattttgtaactggggtggccattgcttttcaagattacaaggaagtctatgtttctactaaagacaaacgtagtggagaaaaaatcagggctgaggatttcaaaccagcaggaaatagttttgccattccagtgtcagatccagtgtcagatcaagacttaggagtgatttacatctccttggatcctgctgttttataccatgccattgataatactagaggtcatactccgatggcagtaacagtgacctcaccttttgatacggagatttttcatatgggtgagacagttgataaggagagtgaaaattggctagttggcttaacttctcatggatatcaggttcaggtggcagttcctaaaaactttgttttacaaggaacagtgactagctctgctttgattgtgggtttgagccttctctttattgtcattctttatctgactttgaggcagacttttgctaattaccaaaagcaggtagtggatttagtagaatccattcaagtcattgctcaaggcgaagaggggcgtcggattgacatttccgagaaagatcaggaattactcctaatcgcggagacgaccaatgatatgttggatcgattggaaaagaatatccatgatatttaccagttagagcttagtcaaaaagatgccaatatgcgagccttgcaggcgcaaatcaatcctcattttatgtataatacgctggagttcttgcgcatgtatgcagttatgcagagtcaagatgagttggcagatatcatttatgaattcagtagtctcttgcgtaacaatatttccgacgaaagagagaccctcctcaaacaggaattagaattttgccgtaaatacagctatctctgcatggttcgctatcccaagtccattgcctatggtttcaagatagatccagagttagagaatatgaagattcccaagtttaccttgcaaccgctggtagaaaactatttcgcgcatggtgttgaccacaggcggacagataatgtgattagcatcaaggctcttaaacaggatggttttgtggaaattttggtggtcgataatggtagaggaatgtcggctgaaaagttggcaaatatccgagaaaaattaagtcagagatattttgaacaccaagccagctacagtgatcaaaggcagtctatcgggattgtcaatgtacacgagcgttttgtgctctattttggagaccgctatgccattactatagagtctgcagagcaagccggtgttcagtatcgtattacaattcaagatgagtagaaagggagaaaatgtataaagtattattagtagatgatgagtacatggtgacagaaggtctgaagcgtttgattccctttgataagtgggatatggaggtcgtcgcaacagccagtcatgccgatgaagctctagaatatgttcaggaaaatcctgtcgatgtcatcatttccgatgtcaatatgccagacaaaacagggcttgatatgattcgggagatgaaagagatcttaccagatgctgcctatatcctgctctcaggttatcaggagtttgattatgtaaaaagagcaatgaaccttagtgtggtggactatttggtcaagcctgttgataaggtagagctgggaaatctgctggagaagattgcaggtcagctcggcgagagagggaagaaaagtcagactcttagtcaagaattagacgaggctggatttgttagttatttaggggataaggagaattggtggataggtctatccaaggaaaaacaaggttccttcaccattccctactatgtcttgggtcaagactggcagattttcatttctggccaccccctagatggtttagtcgttacaccttttgaagctccttatcaagaacactttgaacgctggaagctgaatgctgagaaaaccctcttttacggttctgtaaatctgcagcagtctgagagtctctttgcctattacgaaccgatttatagggttatcattcagggaaatctcaatcaaatcgtagaagagttaaatctcttggagaaggtagttcttgaaaatacacctcgtgtttcgattactaaacagctttttatccagtttgtcatggatgttttccatttatttgaacatctcaaagctgatgatatgacggacattgtcaaaaccattcatgctattcaatccttcgatgaattggtttcttatatcaaggaaactctgatcagctttttcggtcaataccgtatgaatgaaaatgtggtcagtgtgctggaagtcattggtcgtgattaccaaaaagagctttccctcaaggatatcagtaaggccctctttatcaatcctgtctatctagggcagttgattaagcgtgaaaccgattcgacctttgcagagttactaaacaaacaacgtattaaggctgcccagcagctcttgctttcaactagtgacagtatcgaagatatttgttatgctgttggttacagtaaccttggatatttctataaagttttccgaaaattgtgcggaaaatcgccaaaagcctaccgaaaacaggtagaaactatactataagatttgtattcctttacaaaaggtgctataatattatcaggaggtcctatcatgaaaaagaaaccaatttatctatgggttttgctaatcttgtctgcccttatttcagttccgtctctgtttggaattgtgagtcccttgcctagtaaagaagcccttcgtgctgctcagaaacaagttgcaggggtcaatgctcagcaattagaagaccagcttaattatacctatagagtagcagaagcatctcattctatttttaatgttgctttgattgtgctatctactattttagtggtcgtagcgattgtcttccttgttcgtaaaaatttgcaatatgcaaactatacttacgttggctatgttttgttagctattattggttcgatttatggctatgttggtttacaagacgctgtgcagttggttcaagatgagagcatgcgtttgacagtgagtattggttcaaaagctgttagcattttctatatcgtcatcaatgttctcttcctagcccttgtcttctataagatgtggcgacaacagaaagccttggcagaagaagaggaaacagaagagcttacctaagtattgacaaaaaagaactatcaagatacaatcttggtagttgttttttgattatagataaaatcatggaggtacatatgaagacaatttctttagtttatattagtttgagtggcaacactgaaagttttgtgacgcgcttgaaagactatctcttgtcccagtacaaagggattgaggttcaaaagattcatatcaaggatttggtcaaggaaggcaaaaatttctatgaaatggaccatccctatgtcgcttttttgccgacctatctcgaaggtgggaatggcgtggataacggagatgttgagattttgacgacaccggtgggagattttattgcctatggtaacaatgctagtaagtgttttggtgtggttgggtcaggaaatcgtaactttaataaccaatactgcctaacagccaagcaatacagtcaacgctttggcttccctgtattggctgactttgaaatgcgaggcatgctggaagatatcaaacatgtcgcagctattatcgcagatttgtatgagttggaaaaggagaattaatactcaatgaaaatcaaagagcaaactaggaagctagtcgcaggttgctcaaagcacagctttgaggttgcagatagagctgacgtggtttgaagagattctcgaatagtataaagttcttataagaggtggttgaagttgttcaactgttttttgagtataaacagtctttaagaacgtaaaaaagcataagttcaggtcttcaaaaccttgttcttatgctttttatcatagaaatatttgctgaattttctcttgaaatgaaaccttatcttcatctcgcgcttgtcccttaccctgcttttccgattgcgagtgcgtagataaagaagatggcgaagccaaagaggaaaatcaatcccgcaatggcaaggtgtttgagccaagaaggaagatttttgttttcacgcgttaccaaggcgtaattcaaaagagcaaagaaaggtgttgtcaggaaagagccaatcatggcaaagcggagcatggttgaaacctgaccagcgaagaacttgataatgacgataccgatgatagcagtgatggtcatccagatgttcaaagatttacgattgtcctctttttgactgattagcagtcggagagattcctgattaacgcgagaatagccatcgataacagttataactgttccaaagatacagaggaaggcaataaaggtaatcaagtaacgggaccattcgccaagaacagaggcatacatgcccacgaattgagagatgtatttggctgaagcagcttcaaccgcctgccctgtaggatactgaatcagtgctcccagtgccacaaagaagacggctaggatagctgttccaatataaccagtgttaaagtcaaacagagcgtcttctgtgttaaagttgacggtctttctcttttcagctgaccaaagtgaattgatggctgaaatttcaataggagccggcatccatcctaggagggagacgatgaagggcagagctgccatttgccaaggtgtcttctcgacaaaatcagaactgtattctggatgcttgaccgccgcaatgataactgcaagaacagtcgcaatggttaaggcagacataatccatttgaccatgccgtctaaaagtttgtagcctccaaagagtagcatagcccaaatgattgcaacgagaatgagggaccactgagtaatgctaagtccaatcattgggaaggcactggcgatgatagctgagcacagaatggcaacaccagccgtgttgaccatagccgaaaagacattgaggataaagaaaatccagagatagagttttcctttttcggcataaccttcaaccaaagtctttccagtatcagctgtgtattcagcaccaaaacggaaaaatggatatttaaagacattggctaagatgaccaagagaagtagagaccaaccgtaagaaccgccagcttgagttgaggatacaatgtgggaacctccaacagcggcagttgccattaggattccaggtcccattgcttttagcttgcttgcccaggttgattgatttaaggaaatagcttgcgacatgataaatactcctttttgaattttcagaataatctgtatatgtaatctatattctacaaaaaattttggaaaaatgcaagaatattttgaaaaaagatagaaaatttacaaagaaaatctgaaataactgttatgatatagcagattgaaactagaatagtacacctttgcttctaaaacattgttagaaatcgatttgactgtcctgatcgatttatcctgttcttatttcatttcactatagtaaggtgcagcaggataaagaaaaaccgagaagtttctttctcggatttgcttattatgaggttcctattttctatgctccaagagttgattgatgtgatctacttttttagcctctcttttatagagaatagcccagatgatgagatagacaatcgcaaactcgataatgagctggaggtagaaaatccagtggaaagggaaccaaccagcaagagttgctagtgggacaaagccagccagcataaggaagaaatgagtcagagtggcacgaagcatgctccagtcacggctaaataagcggttgccaaagttgaagagcataccgatggttgcccagataagtgtgcagtagagcaagaccagggcaccgtgaacctgatgctgatccatcacttggcctatgagagagtagggatttagtggtgcgtaggtatttggtgcataaatgagtgaaaagaggatagagaggatgaggccgataagaacaccggtagctgcatcgtgaaatacttgttttttcatagttctaatttctccttgatggtttttagataacggcgtgaagagtaggtgaagctttcgtttttcaagaaaatttctaccagaccgtttggcgtgagcttgaggtgagagatggaatcgatattgatgatttctgattgggaaatttggataaaattggttggcaagagtttaagaacctgatagagtcgcaaatcaatgctgtaggtctgactcgcggtttctgctagaaccttccgattctcgatatagaagcgctgaatcttgccaatctcaactagatagacctgatcatcgatttttcctttgattttttctctttggtccagattttctgcgaactcgatgactttctggactttttcggtttcttgaggtgcttggacaatcagcttttcctcctcgtaagtctcactaatctgtagttctactttcatagttttctctccttttcagttatacaaggttgtgatcacttcctgtatatccttattaaacactattttatagcccatggcaaggaaccttgtctatgtggagggattgggctcctatgtggtggagcttttctgttctttctgaaatatggtataatagcactaatcaatttctaggaaaatagatacggaaaggggctgaaagaactaggggaacagttggaattagaaagtgataggtatgaaaagtggcgttgaagctgaataagtttataaagcgtttgaatgaagaaatggaaagtaaataagttgacgatgaattacaaaatagattttatctacaatttgtatctttcaaatcattgatttgaattttagatttaatcatgttacaattaaaactgaaatcaaatagaagaggaaaatgcaaacgtgggcacactattagcaacaagattaaaaaatagacggaaagaattaaaaatgtctcagcgagaactagctgaaggtatctgtaaacaggggcaaatcagtcgattagagagcggagagtttacccctggagcggatttcctgaatgcccttgctaagaagttaaaagtcagtatggattatttttttgatgagcaggttgtagagaaagttgaggagttatcagaatttaagaaattagcacagacatttattacaaatcgcaattatgagtctttgaaatatatatatgaattggagaatgtaaaagctcaccgcctatctttagcagataaaatctacatggaatggataaaatctctgatagatttttatttttacggacagaaagaagatgcgattgtacgattagagggggtattatcacagttaagtgtatctgatttgaactatctccaagtttcaaacaccctattcaatttttattatgatattggagatttaggtcgtttcaataaaattcgtgaaaaactagagtatcaagtaaatcacctcaatttgagtacaatcgaagagttagaactatctattaagtttaactacaacgtttgtcgttatctatggttacagaaaaatattgaagaagctattactaaaattacagctactataaaacaatgtaaggcttacagaacgaattatcttttggctgatttgtacttattgatgggaaatgtaagtgaaaatttttcttctaaaagttcggtgaaagaatattttgagacggcatattttctatacaaacttgaggagaacatgtcaatgactctgaaagttgagcattacattgcagatataacagaataatgaatacggtgttcaagtgagcatcgtttttcaaacctagttcagatacaaaaaagtatcaaacaaaaaaaaataaaaaaacattataaaaacaattgacaagctaattttgaagtgataaaataaatgcaagaaaacaaaaggagaggtatatgagaagtttgtttaagaaaatagttgctgtattagttattggcttaattctgttaggaattgcgagaacacctcaagttcataagatggctagagggattgatcctggtcctgcgaattttatttagaaatcaatttctactaattgagtattaatgggtaaaaagattgtatggataagaaaaatttacttgtattggttactggttcggtaggtgccagtaatgtagatacatacttatattacataaaaaaattctataatgttaaagtgatactttctgaaaattctaaaaaatttataagtaaggaattaattagttatttttgtgataaagtttatgatgaaatatttgttgaagaggtagttccgcacgtttttctgccatatgaatctgacttacttcttattttaccagctacggcaaatgtgattggcaaaattgctaatggtattgctgatgatttagttacagcaactgttttaaactttaataaaaaaataattttttgtcccaatatgaactctactatgtgggacaatcacatagttcaaagaaatgtatcaattctaaaggagttgggacatatatttttatttgagtctaaaaaaacatatgaggtaggattgcgtaaagcaatagattcaacatgttcaatgttacaaccacagtcgttagtaaaagaacttatcaaattagaaaatattgtccttgaagagggacattaaaaactactgagaatattaatgaggggaaaaaatggaaaattcatcaatcgatgtagatatgctgttggaagaattgacacaagaagcaatggtcgttgttgctgttgataaggactgttaatttaaacttatggcaatatatgaaaggttactggatgttttaaattatgcaggcagtagccttttattatatacaaatggataaagtaaggataatacaatgattaataaaaaaatacaacaagttgttttggaatcattacagaattttttgaatgggaacttcatttcgccttgtgtagtctatgattttggcttgctggaaactgtacttgatgaatttaaaaatcaaattcctgtaacattcaattaccaacttttttatgccgttaaagcaaattcaaatgagaagatacttgaattcttagtagataaaattgatggagttgatgtggcgtcattatctgaattagatgtggctaaaaaatttttcccaccaactcaaatttctgttaatggtcccgcattttcttatgaaactttatataatctgattaaaaaacaatataaagttgatattaactttttggaacatcttcaacaattttccccaaaagaatctgttggaataagagtaacggagccagatgaacttaataatcgtatgagtcgatttggaataaatatttgcagtgataattggactagtaatttacaaaatcctttaattacacgactgcattttcattttggagaaaaagatgataaatttattgttaagttagataaaatattatttaagttacaagaaattaataaacttagagaggttagagaaataaatcttggaggcggttttatgaaattatttatggaaaatcgtttgaaagaattttttctatcacttatggaaatctataaaaagtacgatattgatagtactgtgactacaataatagaaccaggtagtgcaattacttcattttctgcctatatgattactagcccagttaatgttagtgaggtgaatgagcagcaggttatcacgttagacacatcaatatacaccaatacattatggtttgttccgcatattattacaacgttaaattcaagtagtaaagagcgttatagtactattctctatggtaatacctgttatgaacatgacaagtataaaatgaaagtttcgcttccaaggttaactcaaaatagcagtatagtgttttttcctgtaggagcttatataaaaagcaatcattcaaatttacatcgtaatgattttatgcgggaggtatatttgtggacaaaaaacttgacatattagataaagttaaggaatatttaggaaataaaactactcaaattctggataatcaatataaagaatttttgaaacttaatgatataaggcgagcgtttggtatttcagaaaaagtattaaacaattcttttaattttacgagtaaagaatttaatgatttaattaataacgaaaattatttattcgaatatgcatgtagaattagagaggaatggagaaaaaaatgctttaatcattcttatcgttttctatgctcacctataattacagatgattttcttaacacgaagacattgagaagtagccaaattgaatataaatatgagcgatatttatcgaaaagttcgataggcgatagagcggttgatggctttgtttccttcaatactttaacagctaatggtatgtctgctattaaactatgtcttgagatattaaactctattttcttcaagaagaagattgatttattatattcaaccggatattatgaaacaagatttttattaaataatcttgctaaatcaggtattagttgctatgaggtaagtaattgtgaattggataaagataaattttataatgtattcatgatggaacccaatcgagccgatttaacattacaaaaaactgatttcaagatagtagaatattttgttaagtataaaaataattcaataaaagtcgttattttagatatttcatatcaaggttctaattttaaattagtagaatttttagagaaatttaaatttgcgaatgtaattatttttgtggtacgatctttgataaaattagatcaaatgggattagaattgacaaatgggggaataatagaagtgtttattcctaatcatttgagaaagttgaaaaattttattgaagaggaattcaataaatttagaaattctcacggagctaatctaagcctctatgaatactgtttgcttgataattctttaactttaaaaaatgattggaactattctgatttagttatgaaatttacgagtaatttttatgctgatataaaagacttgttcatggaaaattctgatattgaaatcatccatgaagagggagtaccttttgtatttttagatttaataggtgaaggtaaaaaagaatatgaaatgttttttcaatggttaaacttcttttacaaacagcttggaatcacattgtatgctagaaatagttttgggtttcggaatctaacagtagagtattttggaattattgggacagaaagatatatatttaagatttgtccaggtgtttataaagggttaagttattatttgatgaaatttttattaaaatctttttcaaatgaatatttaaaaactactgatgaggttaatagatgaaaaatttgataaagttgctaataattagattgattgttaacttagcagacagtgtattttatatagtagcattgtggcacgttagcaataattattcttcgagcatgttcttaggaatatttattgcagtaaattatctaccggatttgttactaatcttttttggaccagttattgacagagtaaatccgcaaaaaattcttataatatcaattttggttcaattagcagtggctgtaatatttttattattattaaaccaaatatcattttgggtgataatgagtctagtgtttatttcagtaatggctagctccataagttacgtgatagaagatgtgttgattcctcaagtggtagaatatgataagattgtatttgcaaattctctttttagtatttcgtataaagtattagattctatttttaattcattcgcatcatttttacaggtggcagtaggatttattttattggttaagatagatataggcatatttttacttgctctatttatattgttgttgttaaaatttagaactagcaatgcgaatatagaaaacttctctttcaaatattacaagagagaagtgttgcaaggtacaaagtttattttaaataataaattattatttaaaaccagtatttctttaacgcttataaactttttttattcatttcagacagtagttgtaccgattttttctattcgatattttgatggtccgattttttatggtatttttttaactattgctggtttgggtggtatattgggaaatatgctagcgccaatcgtaataaaatatttaaaatcgaatcaaattgttggtgtatttctttttttgaacggctcaagttggttagtagcaattgttataaaagactatactttatcacttattttatttttcgtttgttttatgtctaaaggagtcttcaatattatttttaattcgttgtaccaacaaatacctccacatcaacttcttggtagggtaaatactaccattgattctattatttcttttggaatgccaattggtagtttagttgcaggaacgcttattgatttgaatattgaattagtgttaattgctattagcataccttattttttgttttcttatattttttatacggataatggattgaaagaatttagtatatattagaaatgtttatgttcattcaaaagcataatgactataactgaaaaagaaaagtgatatctttaaggttgttcttcttggtggtgagattcgtgagacaacccaagcttttgtcggaaagattaccaatgctttgatggataggatgtactttagcaagatgtttttagtggtaacggtatcgtggatggacgtgtaataacctcttctttcgaggagtattttactaaaaaactagccttggagcgttccccagaaacggacttactcattgactcttcaaagatttggggagaagattttgcttcatctgttccttgaaaaaagtcacagcagtcatcacagacgatagtactgaacaaaactatgaagagttagaaatttatacgcaggtgattgtataaaggatctggaaatagataagaagttgattagtattgacctaggtggtacaaatattaagattactgttctttcaaatgacggtgagattgaaactttgtggagtattacaacagatacaagtgagaaaggttctcaaattatatcggacatcatcagttctattaaaaataaattgaccgaacggaatattcctgatagcgaccttcttggaatcggtatgggaagttgctcatcatactttccttgtaaatcataggggctataaactctccgtctacttgtcctgcaacaattgaagtctgctcaaaacgccgtccgctaatcttttcatagactttctcccttttaggagcctagctttctagtttgttctttgatttttattgagtataccactattttactccctctggcaagggactttgtctatgtggagggattgggctcctatgtggtggagcttttctgttctttctgaaatatggtataatagcactaatcaatttctaggaaaatagatacagaaaggggctgaaagatgtctcatattattgaattgccagagatgctggcaaaccaaatcgcggctggagaggtcattgaacgtcctgccagtgtggtcaaagagttggtagaaaatgccattgacgcgggctctagtcagattatcattgagattgaggaagctggtctcaagaaggttcaaatcacggataacggtcatggaattgcccacgatgaggtggagttggccctgcgtcgccatgcgaccagtaagataaaaaatcaagcagatctctttcggattcggacgcttggttttcgtggtgaagccttgccttctattgcgtctgttagtgtcttgactctgttaacggcggtggatggtgctagtcatggaaccaagttagtcgcgcgtgggggtgaagttgaggaagtcatcccagcgactagtcctgtgggaaccaaggtttgtgtggaggatctctttttcaacacgcctgcccgtctcaagtatatgaagagccagcaagcggagttgtctcatatcattgatattgtcaaccgtctgggcttggcccatcctgagatttcttttagcttgattagtgatggcaaggaaatgacgcggacagcagggactggtcaattgcgccaagcaatcgcagggatttacggtttggtcagtgccaagaagatgattgaaattgagaactctgacctagatttcgaaatttcaggttttgtgtccttgcctgagttgactcgggctaaccgcaattatatcagcctcttcatcaatggccgttatattaagaacttcctgctcaatcgtgctattttggatggttttggaagcaagcttatggttggacgttttccactggctgtcattcacatccatatcgacccttatctagcggatgtcaatgtgcatccaactaagcaagaggtgcggatttccaaggaaaaagaactgatgactctggtttcagaagctattgcaaatagtctcaaggaacaaaccttgattccagatgccttggaaaatcttgccaaatcgaccgtgcgcaatcgtgagaaggtggagcaaactattctcccactcaaagaaaatacgctctactatgagaaaactgagccgtcaagacctagtcaaactgaagtagctgattatcaggtagaattgactgatgaagggcaggatttgaccctgtttgccaaggaaaccttggaccgattgaccaagccagcaaaactgcattttgcagagagaaagcctgctaactacgaccagctagaccatccagagttagatcttgctagcatcgataaggcttatgacaaactggagcgagaagaagcatccagcttcccagagttggagtttttcggacaaatgcacgggacttatctctttgcccaagggcgagatggactttacatcatagatcagcacgctgctcaggaacgggtcaagtacgaggagtaccgtgaaagcattggcaatgttgaccaaagccagcagcaactcctagtgccctatatctttgaatttcctgcggatgatgccctgcgtctcaaggaaagaatgcctctcttagaggaagtgggcgtctttctagcagagtacggagaaaatcaatttattctacgtgaacatcctatttggatggcagaagaagagattgaatcaggcatctatgagatgtgcgacatgctccttttgaccaaggaagtttctatcaagaaataccgagcagagctggctatcatgatgtcttgcaagcgatctatcaaggccaatcatcgtattgatgatcattcagctagacaactcctctatcagctttctcaatgtgacaatccctataactgtcctcacggacgtcctgttttggtgcattttaccaagtcggatatggaaaagatgttccgacgtattcaggaaaatcacaccagtctccgtgagttggggaaatattaaaagtataaaaaagtctgggaaaaattttcaaaatcaaaaaaacgcataaaatcaggtgttcaaaaaccttgattttatgcgttttatcatggaaatagttacttcattttttcctaattcttttcgaaactctttttaaacgacgtcagttttatcagtaatctcaaaacagtgttttgagctaattttgccagttttgtctgtaacatcgaagttgtgttttaccactctgcgactggtttcctagtttgctctatgattttcacagagcattaaattgcgattttgccaagtttctttattcgtctaaaagtagagtctgttctatgcgtctaatgtacgaatcaggttgaccatttcaatagctccttgtgcacactcagaacccttatttcctgctttagtaccagctcgttctatggcttgttcaattgtatctgtcgttagcacaccaaacataacaggaatttcgctatttaaactgatttgggcgattcccttagatacctcgctacatacataatcataatgacttgtattccctctaatgacagctcccaagcagataattgcatcatattttttactttttgccatttttgatgcaatcagtggtatttcaaaagctcctggaacccaggctacctctatatctttctcgtttacattctctcttttgagattatctagtgctccagataataattttgaagttataaattcattaaatctcgctacaacaatacctattttaatattgtttgctactaaattaccttcataagtgttcatttatttttcctccatatttaaaatgtgacccattcgatttttctttgtttctaaataaaaactatcgtaaggattggcttctatttcgattgatattctactggaaatggtaattccatatttttctaactgttcaaccttgtcaggattatttgtcagtaaatgaagtgactgaagtcccagatctttaagcatttttgctccaatatgatattctcttaaatcaccttcaaagcctaatgcaagattggcatcaagcgtatccatgccttgatcttgtaaatgataggcttttaatttattgataagtccaattcctcgtccctcctgtcgcaagtaaagtaagacacccgaaccattctcaacaatcattttcatagccttatcgaattgctgtccacaatcgcaacgtaaagagcctaaaacatctcctgttaaacattcggagtggacccgacataatacattggcttcatcctctatatttcccataataagagcaagatgatgttccccatttagtttatctatatagctaattgctttgaaattaccgtatctagtaggcatattgacagttgaaactcgttctaccagctgatcatatacttttctatattcttgtaattctttgatggtaattagtggaatgttgtgttttttcgagaactgaattaaatcatctgttctcatcattttgccatcatgattcattatttcacaacataggccacactcttttagtccagctaattttaataaatcaacagttgcttctgtgtgtccatttctttctaggacaccacctttttttgcaattaaaggaaacatgtgtcctggcctgcgaaaatcagagggtgttatatcttcagctacacacatacgtgcggtcagtcctctttcctcggcagaaatacctgtggtcgtttctttataatcaattgaaactgtaaaagcagtcttatgattatctgtattgttttcaaccataggtgaaagcattaattgattagctaaactttcgctcataggcatacaaattaatcctttggcataagtagccataaaattaacattttctgttgtagctgcttgtgcagaacaaattaagtctccttcattttctctatccttgtcgtctataacaagaacaagtcgtcccttctgcaatgcttctaatgcttcttgtatttttcgatattccattgactgattatcctttctgctaaaatccattttgatataatagttccttagatatttctgattttggagagttatccatcagtttttgcacatatttacctaagatatcattttcaagatttactgtactcccgacttgtttactcttaagaatggtttgttccaaggtatgagggataacagatactgaaaagtttactttggagactttagcgacagtcagactaatgccgtcaattgtaatagatcctttttcaactattaaatctaaaatttctttttgtgtgttgatttgataccatacagcattatcatctttttttattgacgagatttttcctgtaccatcaatgtgtcctgtaacgacgtgacccccaagtcgaccgttgacagataaggctctttctagattcacctcacttccatgttttaatagagtaagagctgttcgactccatgtttcattcattacatcaactgtaaaggattgatgattgaaatgagtaactgtaagacagataccatttactgctatactatcgcctaaatggatatccgttaatatttttgaggctttaattgatagtttacaattacgagagtctttctgtattctttcaacttttccgatttcttcaattattcctgtgaacatggataaatcacttcactttctatgagatagtcatttcctatttgagaaaatgcataaggtttcaatctaatagcgtcatttggcaaagaaataccttcacctccgacaggaaacttggcactacctccaaaaacttttggtgcaatatatattttcagctcatcaacaatttgttgttccaaagcactccaattcattagactgcccccttctagaactaggctatcaatctgcatgtttcctagatgttgcattaaactcgataagtctatatgattgccttttttctttatggaaagtatttcacagccatgattttgatatagcttcattttatttttgtcttcagaggaagtggcaatgtaagttttaatatcatttgctgtttttacgattttagaggtaagaggagttcgtaaatgtgtatcgcatatgatacggataggatttttcccttcctccaatctacatgtcagcaaaggatcgtcttgaataacagtattgactcccaccataattgcactaacatggtgtcgtaactgatgcacatgctttcttgcttcttcttcagtaatccatttggattgatttgttttagtggctatttttccatccattgacattgcatatttcataaaaacatagggtacatgctgggtaatatactttctaaaactttttattaagttaagacactcattttctaaaattccaacagtaacttgaagattattttcctcaagtatctttactccttttccagatacaataggattacagtctaggcttccaatgactactcttgtaataccactatcgattatagcatctatacagggaggtgttttcccgaagtgacaacagggttcaagtgttacataaagcgtcgctccgacaggggattctctacagtttttaagagcatttctctcagcatgtgggccaccaaaaaactcatgataaccttgtccgataatgtgattatcttttacaataactgcgccgaccataggattgggattgacgtaaccagcccctttttgtgccagttttattgctaatttcatatattttgaatcgctcatctcgctacctccaaaaaaatataccttgaataggggactactcaaggcatacaaaagaaaacttatgcgattaacaaaaatgctctgaaatgacaagtaatcatttcagagcacgcaaaaagcacaaatatacttttatcttctttcatccagactatactgtcggctttggaatttcaccaaatcatgcctttcggctcgtgggctataccaccggtagggaatttcaccctgccctgaagatagttattcaattacagatgattatagtacttaattttgaatatgtcaacagataaataccgattgtttttgatatactgtatttgtgataatcgattctcgctcctcggataaagaaaatatgatatactagataaacgaaataagagagaaggaatactatgtacgcatatttaaaaggaatcattaccaaaattactgccaaatacattgttcttgaaaccaatggtattggttatatcctgcatgtggccaatccttatgcctattcaggtcaggttaatcaggaggctcagatttatgtgcatcaggttgtgcgtgaggacgcccatttgctttatggatttcgctcagaggatgagaaaaagctctttcttagtctgatttcggtctctgggattggtcctgtatcagctcttgctattatcgctgctgatgacaatgctggcttggttcaagccattgaaaccaagaacatcacctacttgaccaagttccctaaaattggcaagaaaacagcccagcagatggtgctggacttggaaggcaaggtagtagttgcaggagatgaccttcctgccaaggtcgcagtgcaagcaagtgctgaaaaccaagaattggaagaagctatggaagccatgttggctctgggctacaaggcaacagagctcaagaaaatcaagaaattctttgaaggaacgacagatacagctgagaactatatcaagtcggcccttaaaatgttggtcaaataggagcagagaatgacaaaacgttgttcgtgggtcaagatgaccaacccgctctacatcgcctatcatgatgaggagtggggccagcccctccatgatgaccaagtattgtttgagttgttgtgtatggaaacctatcaggcaggcctgtcttgggaaacggtactcaacaaacgccaagctttccgagaagtctttcatagctatcaaattcactcagtcgcagagatgactgacactgaattggaagccatgctggagaatccagctatcattcgaaatagagccaagctttttgctacacgcgctaacgcccaagcctttctacagttacaggcagagtacggctcttttgatgcctatctttggtcttttgttgaggggaaaactgtcgttaacgatgttcctgattatcgccaagcgccagctaaaacacccttatctgagaaattagccaaagatctcaaaaaacgaggcttcaagttcacaggcccagtcgccgtattgtcttttctacaggctgcagggctagttgatgaccacgagaatgattgtgagtggaaaggtcttaaatgatgtctaacaaaaataaggaaattctgatttttgcgattctctatacagtcctctttatgtttgatggcgttaaattgctggcttctttaatgccatctgccattgcaaattatcttgtttatgtagttttagctctatatggctccttcttgttcaaggatagattgatccaacaatggaaggagattagaaagactaaaagaaaattcttctttggagtcttaacaggatggctctttctcattctgatgactgttgtctttgaatttgtatcagagatgttgaagcagtttgtgggactagatggacaaggtctaaatcagtctaatattcaaagtacctttcaagaacaaccactactgatagctgtttttgcttgtgtcattggacctctggtagaagaattatttttccgtcaggtcttattgcattacttgcaggaacggttgtcaggtttactaagcattattctggtaggacttgtttttgctctgactcatatgcacagtttggctctatcagagtggattggtgcagttggttacttaggtggaggccttgccttttctattatttatgtgaaagaaaaagagaatatctactatcccctacttgttcacatgttaagcaacagcctctccttaatcattttagctatcagtatagtaaaatgaaatgagaacaggacaaatcgatttctaacaatgttttagaagtagaggtgtactattctagtttcaatatactgtaatatgtgatgaaaatgccagtaatgataccgagaaaaaagctgagaaacttttcccagctttatttgttatagtcaaagagaatgacttgttcctgtgcatctacatgagcatggaccccaaagggtacaattgctcttggagttgcgtggccgacattcagattatagacaatcgggatattgctgtcaatgatatccaatagtgcctctttatagtcgtcatggaaagtttcatccataggttttccgaccaagagtccattgatgaccgcgaatatgccagtgtcctttaaagttagcaacatctttttgaagtcttctggcttaggcttttcttcgcttgtttcgagcaagaggattttcccttcccagtctgacaagtcagggaaaagtttgtatttttggcagagttccgtgctatctgcgtatcgagagttgtcaaagatatcgtagagggattcgaggcaaccaccgaggattttcccctcgaactgggcacttccttgcaacaagtcaaaacctgtatttgtatgactgacacgaggtgttcccagggccgtgggactaaaatcagttcgttcctcataccaaacgtcactagggcggatttctgaaattcttcccgtctcaatcaattctttaaagtagtgaaggctataggctagcatttctttgtctaattcacaaatgtctgctaaaaaggattgaccataaaaagtcttgattcctaatttatgcaacatgaggtggttcatggttgtatccgagaagccaagaaaaattttttgcttgataaccttttggagttggtcattttcaaaaagataaggtagcaagcgataggtatcgtctccaccgatggcacataggatcatgtcgatgctatcatcagaaaaggcatgaatcaaatcctctgcacgagcttcaggatggtccttgataaagtctaatccttttaacgaatggggcaaaaagatgggattgagtcccagatccttgagacgttggatacccaagtccacttcgtgtttgacaaaatcctctccgataatgccactagataaactaacaataccaatagtagaaaccatatctcatcctcctagaaatagattgagcctattttatcacaaaatataagagaaagctatgtgggatttcagaagaatacttttaatactcttcgaaaatctcttcaaaccacgtcagttttatctgcaacctcaaagctgtgctttgagcaacctgcagctagcttcctagtttgctctttgattttcattgaatataactcaaaaaagtaagtgaaaaagcaaccgcacctgcagttgcttttatcgttttcttattcttgatagcgtgttggtcctgcacttgcactacggatattcaagcgtttcttgagatagaagcgaagggctaggagggctgctccaataatagctagtggcaatggatccagtactgggttaaggctagctggtaggaagcttgttgcaaagaagacaagcaaccaaaggaacatagaagctaggataactagtacagatttccagaaaggtggacgttgactgcgatccatatctggtccatagtattggtaaacaaagtagtacatcaagtagaaggcaaatccaccaaccagtccaactaatagaagagtaatcaatccatagccgaaagcttggtctgccgcaaagaaggttgtgagggcgctgacaagggcaaagaggctagtgatgaaaagagctgagtccataatcatcagttttgggtcatcattttcttttggatgctctttttcgtactgctctttgacagtgaagctatgagcccaatgagttggtgcgccgtatagggaacgggcagttgtacctttagattgctcctcaaggatttggggaatgacttcctcaaaaatagtctggatttcagcgtctgttttcccatctttgatgaattgttgggtagcaatgtggacaaactcttggtttttcttagttaatttttgtagatcaatttgagacataggaactcctcttagaaccattttttatggatgagatagagagtgagcgagacactcatagcaaaggcgataaagacgattaaccagaaggcatttggctctccgtttagggggatttcattatccttaaagttcatcccgtaggcagaaaagaccatggttgggatggacatgacgatggtcacaagggccaaggttttcatgatgttgttctggttgttagaaatgatagaggcaaaggtctctgtcatagaatgcaagacgtttccataaatatctgccatctcgatggcctgttgggtttcaatcagggtgtcttcaagcaggtcttcgtcctcaaggtatttcttgatattgctggttgaactggtcaatttcttaatcacgcgctcatttgttttgagggaggccttgaaatagacgatagttttttccaattccatgagctcaatcaattcttcattacgagttgattgatgcagttgactttcgatttgttcactcttgcggtcgattgaacgaagggctgttaggtaaagctctgcattgcgataaagaatttgaaagataaaacgtgaacgcatgaaggtatagaaattacgcaatcgacggttgataaagacatcaaggacaggtagtggttccaaacacgtagtgataatggtttcctcagtgatgataataccaagcgggatggttacgtagtaggtgcggttatttctttcctccgtgaccggcacgtctacgataatcagggtatactcgtcttcaatggtaatacgagacatttcttccgcatcgagcggtgctcgaaggtcagcaatatcaatatcgaaggtgttggcgatttcgagtgattcattttgagtcggattgacgagattgatccaagtacccggttcaagcgtatcgatctctttaaattcagttgttgtagagagaaaaacttgtttcatatcccttatcctttctcatttttcagattttttcacactgtactattatactacaaaatcggccttttgggtaatagaatctcactttttttggtataatggtaagcaataatggactagaaagaacaaagatgcaagataaaattgtcattcatggggcgcgtgcccataatttaaaaaatattgatgtggagattccgcgagacaagttggttgtcgtgactggcttgtcaggttcagggaagtccagtctggcttttgatactctctatgcggagggacaacgtcgctatgtagagagtttgtccgcctacgctcgtcagttcttgggaaatatggaaaaaccagatgtagatgccattgatggtctcagcccagctatttccatcgaccagaaaacgactagtaaaaatcctcgctcgacggtgggaacgacgactgaaatcaatgactatctgcgtctcctctacgcacgtgtggggacgccttactgtatcaacggacatggagctatcaatgcttcttctgtggagcaaatcgttgataaggttttggagttacctgaacgccagcgcttgcagatcttggctcctgtcatccgcaagaaaaaaggccaacataagagtgttatcgagaaggttcagaaagacgggtatgttcgtgtccgtgtggatggggaagtctatgatgtgaccgaagtgccagagttgtctaagagcaagcaacacaatatcgatgtcgtggttgaccgtattgttatcaaggagggcattcgtagtcgtctctttgattccattgaggctgcccttcgtattgcagaaggttatgtcattatcgacaccatggacgactcggagttgttgttctctgagcattatgcctgtccagtttgtggttttactgtcccagagttagagcctcgtctcttttctttcaatgctccttttggctcttgtagtgagtgtgacggcttgggcatcaagctggaggtggatactgatttggtagtgccagatgctagcaaaaccttacgtgagggagcgctagcaccttggaatcctatctcatccaactactatccaaacatgttagagcaggccatgaaagtctttggagtggctatggataagccttttgaggacctgtcagaagaagataagaacttgattctctatgggtcagatggtaaggaattccatttccactatgagaatgaatttggtggcgtgcgcgatatcgacattccgtttgagggagttatcaataatatcaaacgtcgttaccatgaaaccaatagcgattacactcgcactcagatgcgtctctacatgaatgagctgacctgcggaacctgtcaaggctatcgtctcaatgaccaggccttgtctgtccgtgtgggcggccagcaagggccacatattggagaaatctcagacctgtctatcgctgaccacttggacttggtgagccagttaactttgtctgaaaatgaagccatcattgctcgtcccattctcaaggaaatcaaggatcgtttgaccttccttaataatgtgggtcttaactatctaaccctgtcacgttcagcaggaaccctttcaggtggggaaagtcagcgcattcgtttggcaacccagattggttccaacctatcaggtgtcctctatatcctagacgagccgtcaatcggtcttcaccagagggacaatgatcgcctgattgccagtctgaaaaagatgcgtgacttgggcaatactcttatcgtggtggaacacgacgaagataccatgcgtgaggctgattatctgattgacgttggtcctggtgccggtgtttttggtggtgagattgttgcagcaggtacacctaagcaagtggctcgcaacagcaagtctatcacaggtcagtacttgtcaggcaaacgtgtcatcccagtaccagaagagcgccgtgtcggaaatggtcgttttattgaagtgataggagcgcgtgagaacaacttgcaaaatgtcacggctcgctttccactaggaaaatttatcgcagtgacaggtgtgtcgggttcagggaaatcgactctaatcaacagcattctcaaaaaagccattgcccagaagctcaaccgtaattcagacaaacctggtaagtttaagactattacagggattgagcatgtcgaccgtttgattgatattgaccagagccctatcggacggacgccgaggtctaacccagctacctatacaggagtttttgacgatatacgtgacctttttgctcagacaaatgaagccaagattcgaggctacaagaaggggcgcttcagtttcaacgtcaagggaggtcgctgtgaagcttgctcaggtgacgggattatcaagattgagatgcacttcttgccagatgtttatgtggcttgtgaagtttgccacggaacccgctataacagtgaaaccctagaagttcactacaaggaaaagaatatttcgcaggtcttggatatgacggtcaacgatgcggtagaatttttccaacacattccgaaaattcaacgcaaactccagaccatcaaggatgtagggctaggctatgtgaccttgggacagccagctaccaccctttctgggggagaagcccaacgtatgaagttagctagcgaactccacaaacgatcgacaggaaaatctttctacattctggatgagccgacgacagggcttcatacagaggacattgctcgcctgctcaaggttttagctcgctttgtagacgatggcaatacagtcctcgtcatcgagcacaatctggatgttatcaagacggcagaccatatcattgacttgggacctgagggcggtgtcggtggtggaaccatcatcgtaacaggaactccagaagaagtagctgccaacgaagccagctatacaggacactatttgaaaggaaagttacatcatgaataaacgcgtacaagcatttctagctaaaatgcaagaaaaagaactagatggtatcatcatcaacaatcttaaaaacgtctattatttgactggtttttggggctcaaacggaacagtctttatcagtcgtgaccgtcaggtcttagtgacagactctcgctatatcatcgcagctaagcaagaaaccagtggttttgagattgtggctgatcgtgatgaattggctgtcattgcaggaattgttaaggacatgggcttgactcgtatcggttttgaagatgagatttcagtgtcttattaccaccgtatgcaggcagcttttgcaggtttgaacttgcttccacaaactcagtttgtggaaggtcttcgtatgattaaggatgaggcagagattgcagcgattcgcaaggcttgttctatctcagaccaagctttccgcgatgcgcttgactttatcaaaccaggaaaaactgaaattgagattgccaacttccttgatttccgcatgcgtgagttgggagcatctggcttatcttttgatacgatcctagctagcggtatcaattcttctaaaccccatgcccatccaatgcacaaaccagtggagttgggagaagccatcaccatggacttcggctgtctctatgaccactatgtcagtgatatgacccggactatctatctagggcatgttagcgatgagcaggcagagatttacaatacggttctaaaagctaaccaagccttgattgaccaagctaaggcaggcttaggtttccgtgactttgacaaaatccctcgtgatattatcattgaggcaggttatggtgactactttactcacggcattggccacggtattggtctggatatccatgaggaaccctactttagtcagacttctacagaaactattaagacaggtatggccttgaccgatgaaccaggtatctatatcgaaggcaaatatggcgttcgtatcgaggatgatatcctgattacagagacaggttgtgaattattgaccctagctccaaaagagttgatagtcatttagttgtttgtcaagaaaaaagtacgaaaatgacgaaaaaagtcaaaaaaaattaaaaataggtcgcaagtcggatgttttttatggtataatagactaaactgatagtaacatgtagcgaaaggggtaggtacatgattaaaatttatacagtctcaagttgtactagctgtaaaaaagcaaaaacctggctcaatgcccaccagttaagttataaagaacaaaaccttggtaaagaaggaattacgagagaagaattactggatattctaaccaaaacagataacggaatagccagcatcgtttcgtctaaaaatcgctatgccaaagcccttggagtggatattgaagatttgagtgtcaatgaagttctcaatctgattatggaaacaccgagaattttaaagagcccaatccttgtagatgaaaaacgcctgcaagttggctacaaggaagacgatattcgtgccttcctaccacgctctgtccgtaatgtagaaaatgcagaagcacgtttgcgtgcagctctataaacatcaaggctgggagcacttcccagtcttattctattttaatttcaaaaagaaagaagaaagaaatgaaaaaaatagttcttgttagtctagctttcctttttgtcctggttggttgcggacagaaaaaagaaactggaccagctacaaaaacagaaaaagatacgcttcagtcggcattgccagttattgaaaatgctgagaagaatacagttgtaactaagactttggtcttgcccaagtcagatgatggtagccagcagacacaaacaattacttacaaagacaagacttttttgagtctagctatccaacaaaaacgtccagtctctgatgagttgaagacttatattgaccaacatggagtggaggaaactcaaaaagctcttcttgaagcggaggagaaggataagtctatcattgaagctcgtaaattggcaggtttcaaacttgaaacaaaactattgagcgcaacggaacttcaaacaacgactagttttgattttcaagttctggatgtcaagaaggcttcccagttggaacatctgaagaatattggtttggaaaatcttttgaaaaatgaaccaagcaaatatatttcagatagattggcaaatggcgcgacagaacaatagaaaatccaaataaatagactgcctgaattgtagaaggtaaggaattatgctataatggtactattctaaggaaagagggtgttagaatgggatttactgaagaaacagtacgttttaaattggacgattccaataaaaaagaaattagcgaaactttgacagatgtttatgcttcgttgaacgataagggttacaacccaattaaccaaatcgtaggttacgtattgagtggagaccctgcctacgttcctcgttataataatgcacgaaatcaaatccgtaagtatgagcgtgatgaaatcgttgaggaattggttcgctactacctcaaaggacaaggagtcgatctataacctatgagaattatgggattggacgtcggttcaaaaacggtaggggtggcgattagcgatccgcttggttttacagctcaagggcttgaaatcatccagataaatgaagaacaaggccaatttggttttgaccgcgttaaggaattggttgatacttacaaggtggaacgatttgtagtgggcttgcctaaaaacatgaacaatacaagtggaccgcgcgtagaagctagtcaagctacggagcaaagctagaagagttttttggtttaccagtagactatcaggatgaacgcttgacaacagtggctgctgagcgcatgttgattgaacaagcagatatcagtcgcaataagcgcaagaaagtcattgataagttagcagctcagctgattttacaaaattatttagatagaaaattttaatataaaggagaggctatgtcacacgatcataaccacgaccacgaagaacgtgaactaatcacactagtagatgagcaaggaaatgaaaccttgtttgaaatccttttgacaattgatggaaaagaagaatttggtaaaaactatgttcttctagtaccagttaacgcagaagaagacgaagacggacaagttgaaatccaagcttactcattcatcgaaaacgaagatggaacagaaggcgaattgcaaccaatcccagaagactcagaagacgaatggaacatgattgaagaagtcttcaacagctttatggaggagtgatacagtctgggagactgtatcagcccaactcccagaaatggggaagagttggaacgtccagtgaacatttttaccccaactcccagaaatggggaagagttggaacgtccagtggatgtttttagcccatattcacattcatagtagctagttattagctaaccaggtaagaggtcgggacgaaaatcctggccttgtttttattagtaaccatactttaatgcgataattgattggacttttgtcaaggagatgtgtatgtttgaagtagaagaatggctccatagtcggattggtttgaattttcgatcaggtttgggtcgaatgcagcaagcggtggatttgttaggaaatcctgagcagtcttaccctattatccacgtaacagggactaatgggaaaggatctaccattgcttttatgagggaattatttatggggcatggcaaaaaagttgcgacctttacctcccctcatatcgtctctatcaatgaccgaatctgcattaatgggcagcctatagcagacgcagactttatccgtttgactgatcaggtcaaggagatggagaaaacgcttctgcaaactcctgcccagttgtccttttttgaattgctgaccttggttgcttttctttattttagggagcaggaggtggatttggttttattagaagtgggaattggtggcttacttgacacgaccaatgtggtaactggagagtttgctgtcatcacctccattgggcttgaccatcaagaaaccttgggtgatagtctagaagcaattgcagagcagaaagctggtattttcaaggctggtaagaaggcagtgattgcgaaattgcctccagaagctaggcttgcctgtcagaaaaaagccgaatctttagctgttaacctttatcaggcaggtcaagattttttaatgctgaatggtgatttttcaagctctttactaaatctttcacagctgaacataggcttagaaggagtctatcagcaggagaatgcagccttggcgttgcaaacttttcttctttttatgagagaaagaaaggaagctgttgatgaacaggctgtaagaaaggccttggaacagacccattgggctggtcgcttggagcgtattcgcccacagatttatttggatggtgctcataacctccctgccttgactcgcttggctgagtttatcaaagaaaaagagcaggaaggctatcgacctcaaatcctctttggatccttgaaacgtaaggattatcaagggatgttgggttatctgactgaaaaattgcctcaggtggaactcaaggtgaccggctttgactatcagggggctttggacgaaagggatgtgacaggttacgatatagtttcttcttaccgagaatttatcagcgattttgaagaaagggcagacgctcaagacttgctgttcgttacagggtctctctattttatctcagaagtacggggctacctgctggaccgtgagcagataaattgactccattttttgaacttgttatactaggggaattgctggttagagaaaatttctctaaattggtagcagaaaggaaattcatcatgaaattaaaaagattcacactttctcttgcttctctagcaagttttagtctcttagtagcttgttcacaaagagctcaacaggttcaacagcctgttgctcagcagcaggtccaacaacctgctcaacagaataccaatactgcaaatgcaggaggtaaccaaaatcaagcggctccagtacaaaaccaacctgttgctcaaccgaccgatattgatgggacttatactggtcaggatgacggagaccgtatcactttagtggtaactggaacgactggtacatggactgagctcgaatctgacggggatcagaaagtcaaacaggttacattggattcagcaaatcaacgcatgattattggcgatgatgtcaaaatttacactgtaaacggtaatcaaatcgtcgtagatgatatggatagagacccatcggaccaaatcgttttaactaaataagactatgcaagtagaaagggctggatttttcagcctttttacttttacctagaaaataatcataaatacttgccttctaccgaatacctgcgttatactagtatcaattacttgtttttagcattcaaactatcaaggaggggatatgaaatataggaaatttcaattattgatgtccaagtatggctttagtctttcgattatgctacttgaactttgtcttgtttttggtctctttctttatttaggacgcatggctcccattttatggattactgtcctcattctactgagtatcatcacaatcatttcgatagtcaaccgtaatacgactcctgagaataaggtaacctggttgttagtagcctttgtgccagtatttggtcccttgctctatctgatgtttggtgaaaggcgattgtccaaaaaagaaatcaaacaactgaagaagctaggctctatgcatttccaagaagcaaatagccagctactaaaagagaaattaaaagaaagtgacaaggcagcttatggagtcatcaagtccttattgagtatggataccaatgctgacatctatgatcaaactgcctctacattttttcctaacggagaagctatgtggaaaaagatggtagaagatcttaaaaaggctgagaaatttattttcttggaatattacattatagaagaaggtttgatgtggaatcgcatactagatatactagagcaaaaggtagctcagggtgtagaggttaagatgctctatgatgatatcggctgtatggctactttaacaggagattatgcacatcgacttcgtcagctgggcatcgaggcccataaattcaataaagttattcctcgtttgacagtggcttataataacagagatcatagaaaaatattgattgttgatggtcagatagcctatactggtggggtcaatctggcagatgagtacattaaccacgtcgagagatttggttattggaaggatagtggaattcgcttagacggactagcagtaaaagctctgacacgcttatttttgaccacttggtacattaatcgaggagaaattagtgattttgatcaatatcatttagaaaatcattctatcccgagtgacggtttaaccattccatacggaagtggacccaagccaatttttcgagcgcaggtagggaaaaaagtttatcagagtttaatcaatcaagcaacagaatcggtctatattacgacaccttatttgattatagattatgatttaacagagacaatcaaaaatgcagctatgagaggggtcgatgttcgaattatcaccccttacataccagataagaagttcattcagttagtcacgagaggagcttatcccgaccttctttctgctggtgttcggatttatgagtatagtccaggttttattcatagtaagcagatgttggtagacgaagattttgcggtggtggggacaatcaatctcgactaccggagcttggtacaccattatgaaaatgcagtcttactctataaaactccttctataagggaaatcgcccgagattttcgaaatatatttgcagattctcaggaagtctatcctcattctatcaaaacgagctggtatcaaaagcttgtaaaagaaatcgcccagctattcgcccctatcttataagaaatctaggacttaggatacaaaccagacctatttttcttgtcttttacgaatagaaagaaagaggaggggaattcatgctaactaaggaagaagtgaatgatatgattgagttcaaacagacacatttacaccgctttcgggaaattgaaacctttgtgaaactatgcaaaaaatcactcaaacagccatcgcaagctgacaatcctaggactttttgatatactaagacagataaattgaacaggagaaacgatatgagtgtgtatggtagagtagaagaagttcataaggagaatcgtgaacctctagaataccaaatcgaacaagaatcgcatcatcgtgaatcaagtcgtcttcctttggtgaaaattttactatggagtacgcttgtaacggggataactctaggagtaccgctattactcgacttaatgagtgcacaagaagtgcaggatttttatgcaggttgggcgcttcatcagacagggaagatttacagcgactattatggaagtcaaggtttgctttattatttgctgacttacgtgagtcagggcggatttttctttgccatctttgagtggttagccttggtagcaggaggatttttcctttttagatcagcggacaccttgacagagcaaggagaccaagctggacatctggtgactattttttacatgctagttacaggtcttgcttttggtggaggctatgcgactcttttagcgcttcctttcttattcgcagcctttagtttagttgcggcttacctaagcaatccaagccatgataagggatttgtacggattgggctagctttggcaggcggatttttctttgctcccttatcatcgctcctgtttattgctgtagtgagtttaggcttgttggtctttaaccttgggcatagacgctttgcgcatgggttttatcagtttcttgcagtggctttaggtttttcacttgtcttttatccaactgcctactatagtgctgcaacaggaagttttggggatgcgattagtggtattcgttatcctattgacagtattcgctttgattttacttctaaaattttagagaatatgtttttttatggcttgttgtcccttggtttgggatttgtggtttgtatctttttaggtctctttcaatccaaaccctttaaactatacgtcatttcggttcctgcaagtcttgtggtaattttaggtttgattttacttttcttttcacaagagcctctgcacgcttcttatttgatggtcgtcttccctgttttcctacttttattggtaaccaatattaagagtcaacagagggggcgtagtgctagaagaagccgaagagaaacgccagttagcctatggagtcgtttcttcaaaggaaatctatatctgctagtttttgggtttgtctatcttttgtctgttccttttttgatgaagtttgtcctttatccagtaccttatcaagaacgtaatcgtcttgctgatttggtaaaagaggagacaaatacggaagatgctatctcatgcatgggatgatactgcgactctttatcgtaagagtgagcgcttgtcgccatcggcgattttgtccccgttgcactatacagcaactgaggaaaatcgtaataagttacttaatgacttgaaagaaaaacaacctaaggtgattgtggtaaatgataaggtggtagtctggtctgaagtggaaacactcttaaaagaaaattaccaacaagtaaagactgattactcagagtttaaagtctataaaattaaataaccaaatcaatatcttgtgtatttttaaaaattttaggatttttaacacaagatattgatttttctttttagagtggtataatactttttagaaagaacattttagaaaagagcatgcatatgattgcactagaagaaaaaattacaattttgccaactctcttcgtcgagaaacgagatgggagacgtgttgtatttgatgtggacaagattgacaaggctctccacaaggcggctgacaaggttatggatgtgacacccctggttgaaaaatgcctcaatgatctgactgagcgaattattacagaaattcatagtcgctttccacagggaattaagatttacgaaattcaaaatatcgtagaacatgaactccttgaagccaaagaatatgcgctggctgaggagtatattacttatcggacacagagggattttgagcgctcaaaagcgacggatatcaactttagtattcataaacttctcaacaaagaccagacagttgtcaatgaaaacgctaataaagacagtgatgtctttaacactcagcgtgatttgacagcagggattgttgggaaatcaatcggactgcaaatgcttcctaagcacgtagccaatgcccaccaaaagggggatatccactatcacgatttggactacagtccctatacccctatgaccaactgctgtttgattgattttaagggtatgttggaaaatggttttaagattggaaatgcagaggtagagagtcccaagtctatccagactgcgacagcacagatttctcaaatcattgccaacgttgcttctagccagtacggtggctgttcagctgaccgtatcgatgaaattttggcgccttatgcagagaagaattatcaaaaacatctcaaagatgcagaagagtgggtattgcctgaaaaacaggaagattacgcttggaagaaagcgcaaaaggacatctacgatgccatgcaatctcttgagtatgaaatcaatactctcttcacttcaaatggacaaacaccttttacttcgttaggttttggtctgggaaccagtcgttttgaacgagaaattcaaaaagctattttaaacattcgcatcaagggtcttggttcagaacaccgtacggctatctttcctaaacttatctttacgcttaaaagaggcctcaacttagaggaaggaactcccaactatgacatcaagcagttggctctagagtgtgcaaccaagcggatgtatccagacgtcttgtcttatgataagattgttgatttgacaggttctttcaaggtgcctatgggctgccgttctttccttcaagggtggaaggatgaaaatggtgtagaagtcaattcaggtcgcatgaatctgggtgttgtgacggttaatctgcctcgtattgctcttgagtctgaaggtgatatgaataagttctgggaaatcttcaacgagcgaatgaatatcgcagaagatgctcttgtttaccgtgtcgaacgcactaaagaggcgacaccagcgaatgctcctattctttatcagtacggtgcttttggccatcgtctaggtaaagaagaaagtgttgaccagctctttaagaatcgtcgtgcgaccgtttcgctgggctatatcggcttgtatgaagtagcgacagttttctttggtaacagctgggaaagtaatccagatgctaaggaattcacgctagacatcattcacgatatgaaacgccgtgtagaagagtggtcagaccaatatggctaccatttctctatctactcaacaccatccgaaagtctgacagaccgtttctgccgactagatatagacaagtttggctctattcctgatatcacagacaaggaatactacaccaactctttccactacgatgttcgtaaaaatccaacaccgtttgaaaaattggactttgagaaagtctatccggaagcaggtgcgtcaggtggtttcatccattattgtgagtatccagtccttcagcaaaatccaaaggccttggaagctgtctgggattatgcttatgaccgtgtaggctatctaggcaccaatactccgattgaccgttgctacaagtgtgactttgaaggggattttgaaccaactgagagagggtttgcttgtccaaactgtggcaatagcgaccctaaaacagtagatgtggtgaaacgaacttgtggctacctaggtaatcctcaagcaagaccgatggtcaacgggcgtcacaaggaaatcgctgcgcgtgtcaaacatatgaatggttcaacgattaaaatagctgggcatcaagtaacaaattagaaagaaatgaaatgggaaaatatcaactagacgataaggggcgcgcacaagtgacccgttatcacgagaaacactctaaaggtggagctggtaagaaagaacgcttgcttagcttcagagaacaatttttaaacaagaacaagaaaaaataaaagtgagagccagctctcgcttttctcatagtgggaggtaaggatggaattacgcagaccaagattagcggataagaaagctgttttagatatgatgacagagtttgaaaaatttcagtcgcctcacgacggcggtttctgggatacagagaactttgtgtatgaagactggttagaaagcaatcaggaacaggaaatggggattaatctgcctgaaggatgggtttctgcaattcagttagtggctttttctgagaaaggtcaagcagttggatttcttaatctccggttgcgcctcagtaactttctactagaagaaggtggccacattggctactccattcgtccatctgaaagaggcaagggttatgcaaaagagactctccgtcagggcttgcaagttgctaaggaaaagaacatcaagaaagctctggtgacctgtagtgtgaataatcctgctagcagagcagtcattctagcaaatggtggaatatttgaggatgctcgcaatggagtcgagcgttattggatagaggtagcgaatgaataatccaaaaccacaagaatggaaaagcgaggaacttagtcaaggtcgtatcattgactacaaggcctttaactttgtggacggcgaaggcgtgcgcaactctctctatgtatcaggctgtatgtttcactgcgagggatgttataatgttgcgacttggtcttttaatgctggcattccctatacagcagaattagaagagcagattatggcagaccttgcccaaccctatgttcaaggcttgactttgctgggaggggagccttttctcaatactgggattctcttgccacttgttaagcggattcggaaggaattgccagacaaggacatctggtcctggaccggctacacttgggaagaaatgatgttggaaactccagataaactggaattcttgtcactgattgacattcttgtcgatggaagatatgatcgaactaagagaaatcttatgctccagtttcgaggttcatctaaccaacgaattatcgatgtgcaaaaatcgctcaaaagtgggcaagtagtgatttgggacaagctcaatgacggaaaagaaagctatgaacaggtgaagagagaatgaagaaaaaggacttagtagaccaactagtctcagagatcgagacggggaaagtcaggacactgggaatatacggtcatggagcttcaggtaaatcaacctttgcacaggaattgtaccaagctttagattctactacagtaaatttgctagagacagatccttatatcacctcaggacgccatctggtagtacccaaggacgcgccgaatcaaaaggtgacagccagtctgccagtggcgcatgaactggagagtttgcagagagatatccttgcttgcaggcgggtatggatgtcttgacaattgaagaaccttggaaggctagtgaggtcttgtctggagccaaaccaattttgattgtcgaagggatgtctgttggctttctacccaaggaactctttgaaaaaaccatctgtttctacacggatgaggagaccgaattaaagcgacgccttgctagagatacgactgtgagaaatcgcgatgcatcctttatattggctagccatcagatgagacgggagcagtatctgcgatactataaagaaactgagtctaaggcggatatcttagtggaccaatcagaagataaatttgatgtcaagaggacttaacttatgtatagaagaaatatagaagaaaatccctaattttagaaagaaaaagtaggaaaacagtttcatcccaaaaaaacgaaaaaacagcaacaaatcccttgcaatcgcaggggctttgtgttattctattatggtgctgtaaattacagccttagttttgatgcaagaggttgcgacacgctcggttgcattgccacgcaacaccgcgtcggttttcttgtggagctagcctattatcttaaatagacgaaaaggagaaaaagatggcaaacaaaaaaatccgtatccgtttgaaagcttacgaacaccgtacgcttgacacagcggctgcaaaaatcgtagaatcagctactcgtacaggtgcacaagttgcgggtccaatcccacttccaactgaacgtagcctctacacaatcattcgtgcgactcacaaatacaaagactctcgcgaacaatttgaaatgcgtacacacaaacgtttgatcgatatcgttaacccaactcaaaaaacagttgatgccttgatgaaattggatcttccaagtggtgtaaacgtagaaatcaaactttaatctaaaatataaaagagcagaggctggtgtttcaatctaattgaacacgggctaaactcggtgtgaaaaagataaacttcctagtgtctgctagacactgcgtcagtttcctattttcacgttgagtttgacgccctttgtatcttagacttgagcataaaaaacgctcgttaaaaactttttgaataaaaaatatagaaaaggaactattttctcatgacaaaaggaatcttagggaaaaaagtgggaatgactcaaatcttcactgaagctggcgaattgatccctgtaacagttattgaagcaactccaaacgttgttcttcaagttaaaactgttgaaacagacggatacaacgctatccaagttggtttcgatgacaaacgcgaagtattgagcaacaaacctgctaaaggacatgtagcgaaagctaacacggctcctaagcgcttcattcgtgaattcaaaaacgttgaaggcttggaagttggtgctgaaattacagttgaaacattcgcagctggagacgttgttgacgtaacgggtacttctaaaggtaaaggtttccaaggtgttatcaaacgccacggacaatcacgtggaccaatggctcacggttctcgttaccaccgtcgtccaggttctatggggcctgttgcacctaaccgcgtattcaaaggtaaaaaccttgcaggacgtatgggtggcgaccgcgtaacaattcaaaaccttgaagttgtacaagttgttccagaaaagaacgttatccttatcaaaggtaacgtaccaggtgctaagaaatctcttatcactatcaaatcagcagttaaagctggtaaataataaagaaaggggaaatcagtcacaatggcaaacgtaacattatttgaccaaactggtaaagaagctggccaagttgttcttagcgatgcagtatttggtatcgaaccaaatgaatcagttgtgtttgatgtaatcatcagccaacgcgcaagccttcgtcaaggaacacacgctgttaaaaaccgctctgcagtatcaggtggtggacgcaaaccatggcgtcaaaaaggaactggacgtgctcgtcaaggttctatccgctcaccacaatggcgtggtggtggtgttgtcttcggaccaactccacgttcatacggctacaaacttccacaaaaagttcgtcgcctagctcttaaatcagtttactctgaaaaagttgctgaaaacaaattcgtagctgtagacgctctttcatttacagctccaaaaactgctgaatttgcaaaagttcttgcagcattgagcatcgattctaaagttcttgttatccttgaagaaggaaatgaattcgcagctctttcagctcgtaaccttccaaacgtgaaagttgcaactgctacaactgcaagtgttcttgacatcgcaaatagcgacaaacttcttgtcacacaagcagctatctctaaaatcgaggaggttcttgcataatgaatttgtatgatgttatcaaaaaacctgtcatcactgaaagctcaatggctcaacttgaagcaggaaaatatgtatttgaagttgacactcgtgcacacaaacttttgatcaagcaagctgttgaagctgctttcgaaggtgttaaagttgccaatgttaacacaatcaacgtaaaaccaaaagctaaacgtgttggacgttacactggttttactaacaaaactaaaaaagctatcatcacacttacagctgattctaaagcaatcgagttgtttgctgctgaagctgaataatctaaggaggaaatatcgtgggaattcgtgtttataaaccaacaacaaacggtcgccgtaatatgacttctttggatttcgctgaaatcacaacaagcactcctgaaaaatcattgcttgttgcattgaagagcaaggctggtcgtaacaacaacggtcgtatcacagttcgtcaccaaggtggtggacacaaacgtttctaccgtttggttgacttcaaacgtaataaagacaacgttgaagcagttgttaaaacaatcgagtacgatccaaaccgttctgcaaacatcgctcttgtacactacactgacggtgtgaaagcatacatcatcgctccaaaaggtcttgaagtaggtcaacgtatcgtttcaggtccagaagcagatatcaaagtcggaaacgctcttccacttgctaacatcccagttggtactttgattcacaacatcgagttgaaaccaggtcgtggtggtgaattggtacgtgctgctggtgcatctgctcaagtattgggttctgaaggtaaatatgttcttgttcgtcttcaatcaggtgaagttcgtatgattcttggaacttgccgtgctacagttggtgttgtcggaaacgaacaacatggacttgtaaaccttggtaaagcaggacgtagccgttggaaaggtatccgcccaacagttcgtggttctgtaatgaaccctaacgatcacccacacggtggtggtgaaggtaaagcaccagttggtcgtaaagcaccatctactccatggggcaaacctgctcttggtcttaaaactcgtaacaagaaagcgaaatctgacaaacttatcgttcgtcgtcgcaacgagaaataatattaaactagtcgcttaagcaactagtaaatccgccagctcggtagcgctccataggagtgcaagccgctgtggtacaacatttaaaggagaaaatataaaaatgggacgcagtcttaaaaaaggacctttcgtcgatgagcatttgatgaaaaaagttgaagctcaagctaacgacgaaaagaaaaaagttattaaaacttggtcacgtcgttcaacgatcttcccaagtttcattggttacactattgcagtttatgacggacgtaaacacgtacctgtttacatccaagaagacatggtaggccacaaacttggtgaatttgcaccaactcgtacttacaaaggtcacgctgcagacgacaagaaaacacgtagaaaataaggagaacataaatggcagaaattacttcagctaaagcaatggctcgtacagtacgtgtttcacctcgtaaatcacgtcttgttcttgataacatccgtggtaaaagcgtagccgatgcaatcgcaatcttgacattcactccaaacaaagctgctgaaatcatcttgaaagttttgaactcagctgtagctaacgctgaaaacaactttggtttggataaagctaacttggtagtatctgaagcattcgcaaacgaaggaccaactatgaaacgtttccgtccacgtgcgaaaggttcagcttcaccaatcaacaaacgtacagctcacatcactgtagctgttgcagaaaaataaggaggtaaaatcgtgggtcaaaaagtacatccaattggtatgcgtgtcggcatcatccgtgattgggatgccaaatggtatgctgaaaaagaatacgcggattaccttcatgaagatcttgcaatccgtaaattcgttcaaaaagaacttgctgacgcagcagtttcaactattgaaatcgaacgcgcagtaaacaaagttaacgtttcacttcacactgctaaaccaggtatggttatcggtaaaggtggtgctaacgttgatgcactccgtgcaaaacttaacaaattgactggaaaacaagtacacatcaacatcatcgaaatcaaacaacctgatttggatgctcaccttgtaggtgaaggaattgctcgtcaattggagcaacgtgttgctttccgtcgtgcacaaaaacaagcaatccaacgtgcaatgcgtgctggagctaaaggaatcaaaactcaagtatcaggtcgtttgaacggtgcagatatcgcccgtgctgaaggatactctgaaggaactgttccgcttcacacacttcgtgcagatatcgattacgcttgggaagaagcagatactacatacggtaaacttggtgttaaagtatggatctaccgtggtgaagttcttccagctcgtaaaaacactaaaggaggtaaataaccaatgttagtacctaaacgtgttaaacaccgtcgtgagttccgtggaaaaatgcgcggtgaagcaaaaggtggaaaagaagtagcattcggtgaatacggtcttcaagctacaactagccactggatcactaaccgccaaatcgaagctgctcgtatcgccatgactcgttacatgaaacgtggtggtaaagtttggattaaaatcttcccacacaaatcatacactgctaaagctatcggtgtgcgtatgggatctggtaaaggggcacctgaaggttgggtagcaccagttaaacgtggtaaagtgatgttcgaaatcgctggtgtatctgaagagattgcacgtgaagcgcttcgacttgctagccacaaattgccagttaaatgtaaattcgtaaaacgtgaagcagaataaggagaaggcatgaaacttaatgaagtaaaagaatttgttaaagaacttcgtggtctttctcaagaagaactcgcgaagcgcgaaaacgaattgaaaaaagaattgtttgaacttcgtttccaagctgctactggtcaattggaacaaacagctcgcttgaaagaagttaaaaaacaaatcgctcgcatcaaaacagttcaatctgaagcgaaataatagactagggaaggagaaatttcaatggaacgcaataatcgtaaagttcttgttggacgtgttgtatctgacaaaatggacaagacaatcacagttgtagttgaaacaaaacgtaaccacccagtctatggtaaacgtattaactactctaaaaaatacaaagctcatgatgaaaacaatgttgccaaagaaggcgatatcgtacgtatcatggaaactcgcccgctttcagctacaaaacgtttccgtcttgtagaagttgttgaagaagcggtcatcatctaatcaaacctgaaaggagaaaactgaaatgattcaaacagaaactcgtttgaaagtcgcagacaacagcggtgctcgcgaaatcttgactatcaaagttcttggtggttcaggacgtaaatttgcaaacatcggtgatgttatcgtggcatctgtaaaacaagctactcctggtggtgcggttaaaaaaggtgacgttgttaaagcagttatcgttcgtactaaatcaggtgctcgtcgtgctgatggttcatacatcaaatttgacgaaaacgcagcagttatcatccgtgaagacaaaactcctcgcggaacacgtatctttggcccagttgcacgtgaattgcgtgaaggtggcttcatgaagatcgtgtcacttgctccagaagtactttaatttttaggaacaaactagtcccctagcttcaagctagggtgcccttatgggcgtaagaaaaatcaaggagaaacctaatgtttgtaaaaaaaggcgacaaagttcgcgtaatcgctggtaaagataagggaacagaagctgttgtccttactgcccttccaaaagtaaacaaagttatcgttgaaggtgttaacattgttaagaaacaccaacgtccaactaacgagcttcctcaaggtggtatcatcgagaaagaagcagctatccacgtatcaaacgttcaagttttggacaaaaatggtgtagctggtcgtgttggatacaaatttgtagacggtaaaaaagttcgctacaacaaaaaatcaggcgaagtgcttgattaatcacgaaggaaaggagaagtataatggcaaatcgtttaaaagaaaaatatcttaatgaagtagttcctgctttgacagaacaattcaactactcatcagtgatggctgtgcctaaagtagataagattgttttgaacatgggtgttggtgaagctgtatcaaacgctaaaagccttgaaaaagctgctgaagaattggcacttatctcaggtcaaaaaccacttatcactaaagctaaaaaatcaatcgccggcttccgtcttcgtgaaggtgttgcgatcggtgcaaaagttacccttcgtggtgaacgtatgtacgaattcttggataaattggtatcagtttcacttccacgtgtacgtgacttccacggtgtcccaacaaaatcatttgatggacgcgggaactacacacttggtgtgaaagaacaattaatcttcccagaaatcaacttcgatgacgttgacaaaactcgtggtcttgacatcgttatcgtaacaactgctaacactgacgaagagtcacgtgcattgcttacaggccttggaatgccttttgcaaaataatataggaggtaaatctaatggctaaaaaatcaatggtagctagagaggctaaacgccaaaaaattgttgaccgttatgctgaaaaacgtgctgcattaaaggcggcaggggactacgaaggtttatctaaattacctcgcaacgcctcaccgactcgtttacataatcgttgtagggttacggggcgcccacattcagtttaccgcaaatttggtctgagtcgtatcgcttttcgcgaacttgcgcataaaggtcaaattcctggtgtaacaaaagcatcttggtaatttaagatatcaagagcgtcaaaactccaagtaaaaataggaaacttgacgaagaaactaaagtttctaggaaagtttatctttttcacacagagtttagcccgggttcaattgggcttgccaatttgaacacgagctacagctttggcaaaaaagaccaatttgctttggagcattgcttctgcattaaattgtctatttttgctcgtgctgttacgctctttgtatcatgtattaactagcaagtgcaacttgcaaactactagtaagaggagaaaaacaaaatggttatgactgacccaatcgcagacttcctaactcgtattcgtaatgctaaccaagctaaacacgaagtacttgaagtacctgcatcaaacatcaaaaaagggattgctgaaatccttaaacgcgaaggttttgtaaaaaacgttgaaatcattgaagatgacaaacaaggcgtcatccgtgtatttcttaaatacggaccaaatggtgagaaagttatcactaacttgaaacgtgtttctaaaccaggacttcgtgtctacaaaaaacgtgaagaccttccaaaagttcttaacggacttggaattgccatcctttcaacttctgaaggtttgcttactgataaagaagcacgccaaaagaatgttggtggtgaggttatcgcttacgtttggtaaaatcaagatacaaagctcgtaaagaacaaagcaaaattaggaagttggagaagtttgtttacaaacaagccaacttatctattttgcacagttcttagagcgtgttcagttcagctcttgaactaaataagtatctgaaccccgtgaaaactggccgttctggcctgacaatttaacaggagaaaataaacatgtcacgtattggtaataaagttatcgtgttgcctgctggtgttgaactcgctaacaatgacaacgttgtaactgtaaaaggatctaaaggagaacttactcgtgagttctcaaaagatattgaaatccgtgtggaaggtactgaaataactcttcaccgtccaaacgattcaaaagaaatgaaaactatccacggaactactcgtgcccttttgaacaacatggttgttggtgtatcagaaggattcaagaaagaacttgaaatgcgtggggttggttaccgtgcacagcttcaaggatctaaacttgttttggctgttggtaaatctcatccagacgaagttgaagctccagaaggaattacttttgaacttccaaacccaacaacaatcgttgttagcggaatttcaaaagaagtagttggtcaaacagctgcttacgtacgtagccttcgttcaccagaaccatataaaggtaaaggtatccgttacgttggtgaattcgttcgccgtaaagaaggtaaaacaggtaaataatgttgagtggttgatcatcaaccaccaacctattttccaactttgtgcatagcacacgatttaaaactaaagaggtgaaaactgtgatttcaaaaccagataaaaacaaactccgccaaaaacgccaccgtcgcgttcgcggaaaactctctggaactgctgatcgcccacgtttgaacgtattccgttctaatacaggcatctacgctcaagtgattgatgacgtagcgggtgtaacgctcgcaagtgcttcaactcttgataaagaagtttcaaaaggaactaaaactgaacaagccgttgctgtcggtaaactcgttgcagaacgtgcaaacgctaaaggtatttcagaagtggtgttcgaccgcggtggatatctatatcacggacgtgtgaaagctttggctgatgcagctcgtgaaaacggattgaaattctaataggaggacactagaaaatggcatttaaagacaatgcagttgaattagaagaacgcgtagttgctgtcaaccgtgttacaaaagttgttaaaggtggacgtcgtcttcgtttcgcagctcttgttgttgttggtgaccacaatggtcgcgtaggatttggtactggtaaagctcaagaagttccagaagcaatccgtaaagcagtagatgatgctaagaaaaacttgatcgaagttcctatggttggaacaacaatcccacacgaagttctttcagaattcggtggagctaaagtattgttgaaacctgctgtagaaggttctggagttgccgctggtggtgcagttcgtgccgttgtggaattggcaggtgtggcagatattacatctaaatcacttggttctaacactccaatcaacattgttcgtgcaactgttgaaggtttgaaacaattgaaacgcgctgaagaaattgctgcccttcgtggtatttcagtttctgatttggcataagaaaggggataaaatggctcaaattaaaattactttgactaagtctccaatcggacgcattccatcacaacgtaaaactgttgtagcacttggacttggcaaattgaacagctctgttattaaagaagataacgctgctatccgtggtatgatcacagcagtatctcacttagtaacagttgaagaagtaaactaatgaagttttaggggatgtgcactgtaccatcccctaaaactagatatagtcatctatgatgacatcgtataggcgagttgatgggggagacaaccttttctcccttatcggcgctagcattttacaaaagaggagaaaataaaaatgaaacttcatgaattgaaacctgcagaaggttctcgtaaagtacgtaaccgcgttggtcgtggtacttcatcaggtaacggtaaaacatctggtcgtggtcaaaaaggtcaaaaagctcgtagcggtggcggagttcgccttggttttgaaggtggacaaactccattgttccgtcgtcttccaaaacgtggattcactaacatcaacgctaaagaatacgcaattgtgaaccttgaccaattgaacgtctttgaagatggtgctgaagtaactccagttgttcttatcgaagcaggaattgttaaagctgaaaagtcaggtattaaaattcttggtaacggtgagttgactaagaaattgactgtgaaagcagctaaattctctaaatcagctgaagaagctatcactgctaaaggtggttcagtagaagtcatctaagagaggtgacctatgttttttaaattattaagagaagctcttaaagtcaagcaggttcgatcaaaaattttatttacaatttttatcgttttggtctttcgtatcggaactagcattacagttcctggtgtgaatgccaatagcttgaatgctttaagtggattatccttcttaaacatgttgagcttggtgtcggggaatgccctaaaaaacttttcgatttttgccctaggagttagtccctatatcaccgcttctattgttgtccaactcttgcaaatggatattttacccaagtttgtagagtggggtaaacaaggggaagtaggtcgaagaaaattgaatcaagctactcgttatattgctctagttctcgcttttgtgcaatctatcgggattacagctggttttaataccttggctggagctcaattgattaaaactgctttaactccacaagtttttctgacgattggtatcatcttaacagctggtagtatgattgtcacttggttgggtgagcaaattacagataagggatacggaaacggtgtttccatgattatctttgccgggattgtttcctcaattccagagatgattcagggcatctatgtggactactttgtgaacgtcccaagtagccgtatcacttcatctatcattttcgtaatcattttgattattactgtattgttgattatttactttacaacttatgttcaacaagcagaatacaaaattccaatccaatatactaaggttgcacaaggtgctccatctagctcttaccttccgttaaaagtaaaccctgctggagttatccctgttatctttgccagttcgattactgcagcgcctgcggctattcttcagtttttgagtgccacaggtcatgattgggcttgggtaagggtagcacaagagatgttggcaactacttctccaactggtattgccatgtatgctttgttgattattctctttacattcttctatacgtttgtacagattaatcctgaaaaagcagcagagagcctacaaaagagtggtgcctatatccatggagttcgtcctggtaaaggtacagaagaatatatgtctaaacttcttcgtcgtcttgcaactgttggttccctcttccttggtgtgatttccattttaccgattgcagctaaagatgtatttggtctttctgatgttgttgcctttggtggaacaagtctcttgatcattatctctacaggtatcgaaggaatcaagcaattggaaggttacctattgaaacgtaagtatgttggtttcatggacagaacagaataaaagtatttactgaatcagtaaatactgagggagtggaggtttaaactctgacatttgtaagagttggatctcccctcttctattttgtttttaaatcggggtgaaaagactttttgcttctatttaaaaataaaataaggagatcaaatcatgaatcttttgattatgggcttacctggtgcaggtaagggaactcaagcagcaaaaatcgtagaacaattccatgttgcacatatctcaacaggtgatatgttccgcgctgcaatggcaaatcaaactgaaatgggtgttcttgctaagtcatatattgacaagggtgaattggttcctgacgaagttacaaatggaatcgtaaaagaacgcctttcacaagatgatattaaagaaacaggattcttattggatggttacccacgtacaattgaacaagctcatgccttggacaaaacattggctgaacttggcattgaactagaaggtgttatcaatattgaagtgaaccctgacagccttttggaacgtttgagtgggcgtatcatccaccgcgtaactggagaaactttccacaaggtctttaacccaccagttgactataaagaagaagattactaccaacgtgaagatgataagcctgagacagtaaaacgtcgtttggatgttaatattgctcaaggagaaccaatcattgctcactaccgtgccaaaggtttggttcatgacatcgaaggtaatcaagatatcaatgatgtcttctcagatattgaaaaagtattgacaaatttgaaataaagcgtttttcacacttgcaaaaatccgctacaaatgttatactgagatagtctgacttataattgttgtctctgtgtctagaggcatcgaatcgaaatttatggaggtgcttttgcgtggcaaaagacgatgtgattgaagttgaaggcaaagtagttgatacaatgccgaatgcaatgtttacggttgaacttgaaaatggacatcagattttagcaacagtttctggtaaaattcgtaaaaactatattcgtattttagcgggagatcgtgttactgtcgaaatgagtccatatgacttgacacgtggacgtatcacttaccgctttaaataatcgaaaaacttggagggataagaaatgaaagtaagaccatcggtcaaaccaatttgcgaatactgtaaagttattcgtcgtaatggtcgtgttatggtaatttgcccagcaaatccaaaacacaaacaacgtcaaggataagatagaaaggagaaaacatggctcgtattgctggagttgatattccaaatgacaaacgcgtagtaatctcattgacttatgtttatggtatcggacttgcaacatctaagaaaattttggctgctgctggaatctcagaagatgttcgtgtacgtgatcttacatcagatcaagaagatgctatccgtcgtgaagtggatgcaatcaaagttgaaggtgaccttcgtcgtgaagtaaacttgaacatcaaacgtttgatggaaatcggttcataccgtggtatccgtcaccgtcgtggacttcctgtccgtggacaaaacactaaaaacaacgcccgcactcgtaaaggtaaagctgttgcgattgctggtaagaaaaaataatataggaggtaaaagtcttggctaaaccaacacgtaaacgtcgtgtgaaaaagaatatcgaatctggtattgctcatattcacgctacatttaataacactattgttatgattactgatgtgcatggtaatgcaattgcttggtcatcagctggtgctcttggtttcaaaggttctcgtaaatctacaccattcgctgctcaaatggcttctgaagctgctgctaaatctgcacaagaacacggtcttaaatcagttgaagttactgtaaaaggtccaggttctggtcgtgagtcagctattcgtgcgcttgctgccgctggtcttgaagtaacagcaattcgtgatgtgactccagtgccacacaatggtgctcgtcctccaaaacgtcgccgtgtataatcatcgcattacactgcttttcgtttaagagggagtaactaaatgatcgagtttgaaaaaccaaatataacaaaaattgatgaaaataaagattatggcaagtttgtaatcgaaccacttgaacgtggctacggtacaactcttggtaactctcttcgtcgtgtacttctagcttctctaccaggagcagctgtgacatctatcaacattgatggtgtgttacatgagtttgacacagttccaggtgttcgtgaagacgtgatgcaaatcattctgaacattaaaggaattgcagtgaaatcgtacgttgaagacgaaaaaatcatcgaactggatgttgaaggtcctgctgaagtaacagctggtgacattttgacagatagcgatattgaaattgtaaatccagatcattatctctttacaatcggtgaaggttcttctctaaaagcgactatgactgttaacagtggtcgtggatatgtacctgctgatgaaaataaaaaggataatgcaccagttggaacacttgctgtagattctatttatacaccagttacaaaagtcaactatcaagtggaacctgctcgtgtaggtagcaatgatggtttcgacaaattaacccttgaaatcttgacaaatggaacaattattccagaagatgctttagggctttcagcacgtattttgacagaacatcttgatttgtttacaaatcttactgagattgctaagtcaactgaagtgatgaaagaagctgatactgaatctgacgaccgtattttagatcgtacgattgaggaactggacttgtctgtgcgttcatacaactgtttaaaacgtgccggtatcaatactgtgcatgatttgacagaaaaatctgaagcagagatgatgaaagtacgaaatcttggacgcaagagtttggaagaagtgaaactcaaactcattgatttgggtcttggattaaaagataaataaaggaggaatacatggcttaccgtaaactaggacgcactagctcacaacgtaaagcaatgcttcgcgatttgacaactgaccttttgatcaacgaatcaatcgtgacaactgaagctcgtgctaaagaaatccgtaaaactgttgaaaaaatgattactctaggtaaacgtggtgatttgcatgcacgtcgtcaagcagctgctttcgtacgtaatgaaatcgcatctgaaaactatgatgaagcaactgataagtacacttctactacagcacttcaaaaattgttctcagaaatcgcacctcgttatgctgaacgtaacggtggatacactcgtatccttaaaactgaatcacgtcgtggtgatgcagcgccaatggcgatcatcgaattagtataaaatcatcaattttgttgagtgttatgatgatggagtcttgtgctcttagtctagctctggtctaccgctaggatttcggtcctagcgggaacactcatcataagttgggatagtagacgcttgtttacgaaattgtttttttcttaagaacaacttcgtaagcaggcgtttttgagtattttcgttagaattatgctatactatttgaaaagaatcctgtttaatgttaaggtttcttattttaagaagaattggagtttacttatgaaagccattataactgttgttggtaaagataaatctggaattgttgcaggtgtttctggtaaaattgcagaattaggattgaatattgacgatatctctcaaactgtcttggatgaatattttacgatgatggctgttgtatctagtgatgaaaagcaagattttacctatcttcgtaatgaatttgaagcttttgggcaaactttgaatgtaaaaatcaatattcagagtgcagcgattttcgaagctatgtataatatctaggaggtcatcatggatattagacaagttactgaaaccatcgccatgattgaggagcaaaacttcgatattagaaccattaccatggggatttctcttttggactgtatcgatccagatatcaatcgtgctgcggagaaaatctatcaaaaaattacgacaaaggcggctaatttagtagctgttggtgatgaaattgcggctgagttgggaattcctatcgttaataagcgtgtatcggtgacacctatttctctgattggggcagcgacagatgcgacggactacgtggttctggcaaaagcgcttgataaggctgcgaaagagattggtgtggactttattggtggtttttctgccttagtacaaaaaggttatcaaaagggagatgagattctcatcaattccattcctcgcgctttggctgagacggataaggtctgctcgtcagtcaatatcggctcaaccaagtctggtattaatatgacggctgtggcagatatgggacgaattatcaaggaaacagcaaatctttcagatatgggagtggccaagttggttgtattcgctaatgctgttgaggacaatccatttatggcgggtgcctttcatggtgttggggaagcagatgttatcatcaatgtcggagtttctggtcctggtgttgtgaaacgtgctttggaaaaagttcgtggacagagctttgatgtagtagccgaaacagttaagaaaactgcctttaaaatcactcgtatcggtcaattggttggtcaaatggccagtgagagactgggtgtggagtttggtattgtggacttgagtttggcaccaacccctgcggttggagactctgtggcacgtgtccttgaggaaatggggctagaaacagttggcacgcatggaacgacggctgccttggccctcttgaacgaccaagttaaaaagggtggagtgatggcctgcaaccaagtcggtggtttatctggtgcctttatccctgtttctgaggatgaaggaatgattgctgcagtgcaaaatggctctcttaatttagaaaaactagaagctatgacggctatctgttctgttggattggatatgattgccatcccagaagatacgcctgctgaaactattgcggctatgattgcggatgaagcagcaatcggtgttatcaacatgaaaacaacagctgttcgtatcattcccaaaggaaaagaaggcgatatgattgagtttggtggtctattaggaactgcacccgttatgaaggttaatggggcttcgtctgtcgacttcatctctcgcggtggacaaatcccagcaccaattcatagttttaaaaattaagaaaataggagaaattttaagttctatttaagattagacgtgtatactataatcattaaataaagacctcctaatattatttgaaacagataacactgaattagtttgaatttgattttcatctaatatctttatttaatgaactcctaaactttttcataataatctccttcaaaagtcgcctgtatgggtggcttttattttatcattcatgatataatagaagcaaacggaggacggaaaatggtaaaagtacgattgtatttggtacgtcatggcaagaccatgtttaacacgattggtcgcgcgcaaggttggagcgatactcccttaactgctgaaggtgaacgagggattcaagagttaggaatcggtttgcgagaatctgatctacagtttgagcgtgcttattcgagtgattctggtcgtaccattcagaccatgggaattatccttgaagaacttggcttgcagggggaaatcccttatcgcatggacaagcgtatcagagaatggtgtttcggtagttttgatggagcctatgatggcgatcttttcatgggcattattcctcgtatctttaatgtggaccacgttcaccaattgtcttatgctgaactggctgagggcttggtagaggtcgatacagctggttgggctgaaggctgggaaaaactcagtggccgaatcaaggaaggctttgaaatgattgcaaaagaaatggaagatcaaggtggaggtaacgcccttgttgtcagccatggaatgactattggaaccattgtttatctgattaatggcatgcatccgcatggtctggataatggtagcgtgacaatccttgaatatgaggacggccagtttagggttgaagttgtcggtgaccgtagttaccgagagctaggacgtgagaagatggaagaaggctctatttaatcagtctagacttgcttgccatgagctagggatttgataagaatatcaagataagaaaaaacagccgagggcactcctttcggctgtttttgatgtggaaaactaaagtgtaatgctattgcttttagagattttcataaacaagagcaaggaacctactgttagaacagtcaggatagttgacaaggttgcggctacaccgtaatttcctctgagaacctctgtataaatagctacagtcattgttcttgttttgacattgtagaggaggatagaagtagagagttttgaaatcattgtgactcaagataagatggctccagaaatgataccagatagcatcattggagttgtaatcttagcaaaggtattgagacgactacttcctaagctttcagcagcttcttcaatacttggtgctatttgttgtaagctagcaacagatgagcgaatagtataaggtaatcttctggcagatagagacataatcaagatgaaagcagtccctgtaatcataagaaatccacttccaaatagaccagtattgaaggaagaaatgaaggcaatccctagaacggttcctggtacaatataaggtaccatactgaggctgtcaattaagtttgtaaacaaattccgttttctaacggctaggtaggagataaatgtcgcaaatagaacaactagaactaaggcaatcaaagggatacgaatggtattgaaaatagcagatcccatacgatggaaagctaccttgtaactgtttggagaataacctttaacagataccatacctgatgtttttaggaaagaggtataaattaagtagatttgaggtaaaacagagataaagataattccgtagactgttgcataaatggcagccatttttccttttgtagtttttttaggctcaattggatggagcagattcatgctgaaactgtagcggtttgcaatgtgtttttggataaggaaaattgccaaggcaatgataatcgccataattgcaaaagcagaatttcctccaacctcgctaataaattgggtataaatcaggacagggaaagtccgatacccttcgccaatcaacataggcgttccaaagtctgagaatgctctcataaatacaagcaaggagctgctagtaaggttggaactaggagaggtaaaacaaccgttacgataggtttaaatccgaaggaccccatgctttcagctgcttcaagtagagaattgtcaatactgttcattgttccagcaacatatagaaataccagtgggaatagttgcagtgtaaagacaagtacaattcctttgaatcaataaatatcgatagctggaagataaagggcatttgtcaaaaatttagtgatgacctcatttcgtcctagcaagagaacccaggagtaggctcctacgaaaggagctgacatggaagcaatgataatcaatatttgtagaaatttcttccccttgaagtcatacatagagaagagataagctaatagggttcctacaactaaggaagtgatagtagcggtaatggaaaccttgaaactgttgactagtgtctcagagtagtaggctttactaaagaaagtgacaaaattagctagtgagaattgtccttcatgtataagtgcttgcttgagcacggtaacgataggataaacgagaaagataggataggtaagaaagaggaagaaagaggaaactgtccaaatatttagttttttacgttccatggttgactccttttatcaggttttgggaaccatctgcagaaaagatgtttaatttttgcgtattgattcgtagacgaatacgattgcctttttgtagatcttcttcaaaagttgattcttcactaacttgaatttttgaggcaaaacctgtctcaatgaaataatccgtatttagtccaagatagacgctatctctaatagttccttcaatatctccagattcatctttgataaactcttcgggacgaatgcttacatgaatagcttgctcctcaacctgatcaagagctggcattcgaagggcatagccatctgaaaagacgatataagcgccgtcgctccgtttttcaagattggcagggataatatttgtgcgtccgataaaggttgccacaaactcattagctggtttatgatagagttcttttggtcggccgatttgttggatcaccccatctttcataacagcaatttggtctgaaatagccatggcttcttcttggtcgtgggttacataaacagttgtaattcccacttcgtgttggatttctcggatggcttgacgcatatccaagcgaagtttggcctccagattactaagtggctcgtccatgaggagaacacttggattaaccgctaaggcgcatgccaaggtgacacgttgttgttgtccaccactgagtttatcgggctttcgatccgcatattgagcaatttgcatgagttcaagatacttgttggtctgttgaatcaattcttcttttggaaccttcttttgcataagaccaaaagcaacgttgtctcggacagtcaaatgtgggaaaatagcgtagttttggaaaaccatcccgatattgcgtttgctgggttccatattattgatttttgtatcatcgaagtaaaattctccaccttcgatactgttgaaacctgcaatcatacgaagaagggtcgttttcccacatcctgaagctccaagaagggtaaagagacttccttttggaattgtaatgttcaaattctcaataacagggacatcgtggtagatttttttggcgttaataattttgatctcactcatagtgaacctcttttactgtttagattggatatctgtaaagacttcgttgtatttcttaacgatatctgatttattcttgatgacataatcataatcttcagtgagtgttttgattttgtcaattggtttcatgttttcgcttgttttagcatttttacgaacaggacggttagtagtggttgtaccaagtgtatcttgtacttcttgagagataataaaatcgataaatttcttggcattttccatatttttagattttttaacgatagcagcactagcaggtaggaagacggttccttcttttggatagactaccttaatgttagctccgtcatttaagagtttaactgctggatcttcataagagagaccaacagccatttctccatcagcgactactttatagacactagatgaacttgaaccgattttaccatcaataagtgtgaaaagatcttttacataagaccaagccttatcatctttgtaaccaccttgagcttgtagcatatttgttaattgagcaaaggcgctagaagagtttgctgggtcagcagttgcgatttttccttttagttcaggtttgaaaagatcgttatatccttcgatgttcatgcctttagttaaatcagggttgacgattaaaacactaccatctagtgtataaggagtagagtagccagttgtgttttgatattctttgataacattatcattttcttttgaagtatagttttcaaagagttctccgtgggtagtatattgtgtataagaaccaccaaagataacatcagctacaggaacttctttttctgactctagttttttgaaaagttctccagtaccagcttgaatcagttctactttgataccatatttttcttcaaaggcaggaatagttgctccaattaagccctctgagtttggtgaataaacgactagcgaaccgccgtctcctttatcagatgaactgtcatcggcagattcattagaagaacaagcagcataatacatccatttctttttcatgatggatacctccgttgtgttatttaagtttattttaaaacaatgtaagcgtttttaaaacatacaattctattctatagtgtattgaatctataacagtacactttgactgctaaaatatttctataaattaatttgactttcctgatagagatgttcacatcttatttcaattcactatattagagtaaaattctctacaaaaagaagaatagcctattttactattcttctgagtgatttcaattcctttggggaaatatggagatactttttaaatcctgacaaatggttgtttctttttctaaatcggtgatactgtatcggagaatgcgcgtgaggtcacaaaggctgcgatagagcttctatggagaatttctttttggagagattttttaaaggaatgagacatccgctacctccttggaaggtttttttgtgataagtatagcagtttaaaaattctagagcaaggtaaaatagaaaaggtttggctaaaattttttagctaaaccttttgaaaagttaagtatgtattatagatgcttgttatctgcaaatagctagagcatttcaaggaaataaactagaaataacaattaatatggtggttcagaaataccttttgataatcaataagatcttcaggatgaagtgcgttgattccatccatttcatatttccgatttaataaacgatatttgttttcaccaaattgatgaaaagggagtagttgaacttggtcgatatttaatgagttaaatagagtagcgaatttttctgcatcctctaaactattgttaaaattaggaataactgggattcttaaaacgatagttttattttgtgaaaaagcataatgaatgtttttaataatcatttgattaaaaaccccagtcacttttttatgttttatagaattataatgttttaggtctgtgtagataaaatccacatattgaattaaatcaataaatttttcatgatcaacaaaggcagtagtttcaatggcagtgtgtatgtgatgttctttagctgattttaagatggctttagcaaattcaaactgagcaaatatttcacctcctgataaagttaaacctccaccggattcttcgtaaaattctttgtcttttaatacctctgtaataatttcttctacagtcttttcttcaccgactaaggtgaatttctctcgttgagcatctttcattttttcaggtttcattctttgagattcaggattagaacaccatggacagcgcagaggacatccttttaaaaaaacagttgtacgaatacccggaccgtcatgaattgaaaagtgttgaatattaaaaataattcctttagatatttccataagagttcctcctcttcataagtctatcctatcacaaaaacgaaagaaaaacaattacgaacgaaaggttaatttgttgttttttgctttttattttggtagaataaaacggaggtgtaaaatgaaaagattggaacaaattattaaattagtatcagaatatgaaaagatcgacgttaatacattatcggaaaaattaaatgtatcgaaagtaacgattagaaaagatttagataaattagagtcaaaaggtttattacacagagagcatggatatgctgtattaaatagtggagatgacttaaatgtacgtttgtcaattaattatgaaactaagagaaaaattgttcaggaagcagtaaaattggtgtcagataatgaaacaataatgatagaatctggatcgacctgtgctttacttgctgaggaaatttgcaagcaaaaaagaaatgttacgattgtaacaaattcgttttttatagcaaattttgtgagagcttatgattcatgtcgtgttattgttcttggtggtgagtttcagaaagattcacaggtgactgtaggacctttattaaaagaaatgatacagacttttcatgtgtgtcaagcttttgttgggacagatggttacgataaagagatgggctttaccggaaaagatttaatgcgcagtgaggtagttcaatatatttcagcagtgtcggataaagtcattgtcctaactgactcaagtaaatttgataaaagaggtacagtaagaagatttgctttaagtcaagtctatgaagtaataacagacgaaaaactttctaaacaaaatatagctacattagaaaatgctgggataatggttaaggtagtttcgtaagaggttaagtgtatgaatcaagataggaataaactgctttctaaaattgcttatctgtattatattgaaaacttaaatcagtcacaaatagcagcaaaattaggaatttatagaacctctattagtagaatgttaacagaagcaaggaatgtaggaattgttaaaattgaaatagagaattttgataccaatatgtttaagttggaaaattatgtaaaagaaaaatacagtttggaaagtttagaaattattccaaatgaatttgatgatactccaacaattttatctgaaagaatttctcaagttgcagcaggcgtccttaggaatctaattgatgataatatgaaaattggcttttcttgggggaaaagtttaagtaatttagtagatttaattcacagtaaaagtgtccgaaatgttcacttctatcctctagcaggtggtcctagtcacatacacgctaaataccatgtgaatacactgatttatgaaatgtctagaaaatttcatggagagtgtacatttatgaatgcaacgattgtgcaagaaaataaattgttagcagatggtattttgcaatcaagatattttgaaaatttgaaaaatagttggaaagatttagatatagctgtagtcggaattggtgattttagcaataaagggaaacatcaatggttagacatgcttacagaggatgactttaaagaattgaccaaagttaaaactgtaggagaaatttgttgtcgattttttgattcaaaaggtaaagaagtctatgaaaacttacaggaaagaacgatagcaatctctttggaagatttaaaaaatattcctcaaagtttagctgttgcttacggtgatacgaaagtatcttcgattctttctgtcttgcgtgctaatttagtaaatcatttgattacagacaaaaatacaattttaaaagttttggaagaagatggggatttgacttttagagagattctaggtgagtgaaaatgatagactgattcagtttatcgtttttctttttagttgattgcacatttgtgcttatataaacaaaaatagtttatctgttgtttttggattgacaactttattatgtagttgtattctatagttacaaaagaaaattttaaaatttcaaatgaaaaaagctttttacatagtgaaatgaggaggaatttatggaaatgattgttccagatcaaattatcatgggtttaattttatatgctggtgatgcgaaacaacatatttataaagcgttagattacataaaaaatggtacatgtgaacggtgtgaagaagaaatacagttagctgatgcagccttattagaagctcataatctacaaacaaaatttttggcacaggaagcgtctggtacaaagacagaaattacagctctctttgttcattcacaagatcatctcatgaccagtatgacggagattaatttaatcaaagaaattattagtttgagaaaagaacttcataaaaaataatactagagtattatcattgttattaacatagaggaggaaaacataatggtgaagattggtttgttttgtgcagcaggtttttctactggtatgcttgtaaataatatgaaaattgcagcgcaatctagtggagttgaggcagaaatagaggcgttttctcagtctaaattagcggattatgcgccaaatatagatgttgcactattgggtccacaagttgcttatacattagataaatcaaaagaaatttgtgataagtgtgatgttccgatagctgttattccgatgatggactatggtatgttagatgggaaaaaagtattagatttggccctatctttgattagtgggtaagaaaaggagatttattatgtcaaagatggatgttcagaaaatcattgcaccgatgatgaagtttgtgaatatgcgtggcattatagctctaaaagatgggatgttagcaattttgccattgacagtagttggtagtttgttcttgattatgggacaattgccgttcgaaggattaaataagagcattgctagtgtttttggagctaattggacagagccgtttatgcaagtatattcaggaacttttgctattatgggtctaatttcttgtttttcaattgcctattcttatgctaagaatagcggagtagaggctttaccagctggagttctatctgtatctgcattctttattttgctaagatcatcttatatccctaaacaaggtgaggcgattggggacgctattagtaaagtttggtttggaggccaaggaattatcggtgctatcattataggtttggtagtaggaagtatttataccttctttataaagagaaaaattgttattaagatgccagaacaagttccacaagctattgccaaacagtttgaagcaatgattccagcatttgtaattttcttatcttctatgattgtatatattttagcgaagtcattgactaatggcggaacattcatagaaatgatttattctgctattcaagttccgttgcaaggtttaactggatctttgtatggtgctattggaattgcattctttatatcatttttgtggtggtttggtgttcatgggcaatcggtagtaaatggagtagtgacagctctgcttttatctaatcttgatgctaataaagctatgttagcctctgctaatctatcattagaaaatggtgcacatattgttactcaacaatttttagattcatttttaattctatcaggttcagggattacgtttggtcttgtagttgccatgctttttgcagcaaaatcaaaacaataccaagccttaggaaaagttgcagcttttccagcaatatttaacgtaaatgagccagttgtatttggatttccgattgtcatgaatccagttatgtttgtacctttcattcttgttcctgtacttgcagctgtgatagtatatggagctattgcaacaggtttcatgcagccattctcaggggtaacattgccttggagtacaccagctattttatcaggatttttggtgggtggatggcaaggagttattactcagctggtgatattagcgatgtctacattggtttattttccattctttaaagtacaggatcgtttagcttaccaaaatgaaatcaaacaatcttagaggtatttgtgtgttactgttaaactcacacatttgtgctaaaaattagagagttaaaatttttctagttaaaagcttgaaaatttctataaaaatcggtattatattttcgaaagaaataaaaatattttcgaaagaaaggtgcttacgatggtaaatacagaagtagcaagaacaacaatcaagacagaatattttggcagccttactgaaaggatgaacaaatatcgagaagatgttttaaataaaaaaccttatattgatgctgagagagcagttctagcaacacgcgcctatgaacgatacaaggaacaacctaatgtcctaaaacgtgcatatatgctgaaagaaattttggaaaatatgactatctatattgaagaagaatctatgattgcgggaaatcaagcttcttccaataaagatgctcctatttttccggaatatacgctagaatttgttctcaatgagttggatctttttgaaaagcgtgatggagatgttttctatattacagaagaaacaaaagaacaacttagaagtattgctccgttttgggaaaataataatttacgtgctagagctggtgccttattacctgaagaagtgtctgtttatatggaaacaggattcttcggtatggaaggtaagatgaattctggagatgctcacttagcagttaactatcagaaacttttgcaatttggtttaagaggttttgaagagcgggctcgtaaagcaaaagtagctctagatttaacagatccagcaagtattgataaatatcatttttacgactctatatttatcgtaatcgatgctattaaagtatatgcaaagcgctttgttgctcttgctaaaagtttagccgaaaatgcaaatcctaaacgtaagaaagaattacttgagattgcagatatttgctctagagtcccatatgaaccggcaactacttttgcagaagctattcaatcagtttggtttattcaatgtattttacaaattgaatctaatggccactctctttcatatggccgttttgatcaatatatgtatccatatatgaaggctgatttagaaagtggtaaagaaacagaagatagcattgttgaacgtctgacaaatctttggattaagacaattacaattaataaggttcgcagtcaatcacatacattttcttcagcaggaagtcctttatatcaaaatgttacaattggtggacagactcgagataagaaggatgctgttaacccattatcttatttggtattaaaatcagttgcacaaacccatctaccgcaacctaatctaactgtacgttaccatgcaggtttagatgctcgtttcatgaatgagtgtattgaagtgatgaaacttggttttggtatgcctgcatttaataatgatgagattattattccttcttttattgcaaaaggagtattggaagatgatgcttatgattacagtgccattggatgtgttgaaacggcagttccagggaaatggggctatcgttgcacaggtatgagttatatgaacttccctaaggttctacttatcacgatgaatgatggaattgatccggcttcgggtaaacggtttgcaccaagctttggtcgttttaaggatatgaagaacttttctgaattagaaaatgcttgggataaaacactaagatatttgacacgaatgagtgttattgttgaaaattctattgatttatcattggaacgagaagttcctgatattctatgttcagcattgactgatgattgtattggtcgtggaaaacaccttaaagaaggtggagcagtatatgattatatatcaggattgcaagttggaattgcaaatttgtcggattcattagctgcaattaaaaaattggtgtttgaggaagaacgtataagcccaagtcagctttggcatgcactggaaacagattatgccggagaagaaggtaaggtcattcaagaaatgttgattcatgatgcacctaagtatggtaatgatgatgattatgctgacaaattggttactgctgcttatgacatttatgttgatgaaattgctaaatatcctaatacacgttatggaagagggcctattggaggaattcgttattcaggaacatcttctatctcagccaacgtagggcagggacgtggaacattagcaactccagatggacgcaacgcgggtacaccgttagcagagggttgttcaccatcacataatatggatcaacacggccctacatctgttttaaaatctgtttcaaaattaccaacagatgaaatcgtaggtggggttctcttaaatcagaaagtaaatcctcaaacgttagccaaagaagaagataaattaaaactaattgctttgttacgaacattctttaatcgtttacatgggtaccatattcaatacaatgttgtttccagagagacgctgattgacgctcagaaacatcctgaaaaacacagagacttaattgttcgtgttgcaggatactctgcattcttcaatgttctttctaaggcaacccaagatgacattataggacgtactgagcatactttgtaaaataaagaggttctttttatggaatttatgcttgacacattaaatttagatgagattaaaaagtggtctgaaattttgccgctagctggggtaacttcaaatcccactattgcaaaaagagagggttctattaatttttttgaacgaatcaaagatgtaagagaattgattggctctacaccctctattcatgttcaggtgatttctcaagattttgaaggcatcttaaaggatgctcataaaattcgaagacaagcaggagatgatatatttatcaaagtacctgttactccagctggattacgtgcaataaaggcgctaaaaaaagagggctaccatatcactgcaacagctatttatacagttattcagggattattagctatcgaagcaggagcggattacctagctccatattataatagaatggaaaatctgaacattgattcaaattctgtcattcgtcaattagctcttgctattgatagacagaactctcctagtaagattttagctgcatcctttaaaaatgtagcacaagtaaataatgctttagctgcaggtgcgcatgctgttacagcaggagcggatgtttttgaatcagctttcgccatgccatctatccaaaaggcggttgatgatttttctgacgattggtttgttattcaaaatagtcgttccatttagatagagaggaaatacatatgagaatttttgctagtccttctagatatattcagggggaaaatgccttgtttgaaaatgccaaatcaattttggatttgggaaattgccctattctattatgcgatcagttggtttatgatattgttggaaaacgatttgaagattacctacataggtatggtttccatattgttctggcgctatttaatggtgaagcttctgacaatgaaatcaatcgagttgttgccttggctgagaaagaaaattgtgatagtattatcggtcttggtgggggaaagacgattgatagcgcaaaagctattgcagatttgattgaaaagcctgttattattgctccaacaattgcatcgaccgacgcacctgtatctgctttatctgttatttatacagatgaaggtgcatttgatcattatctattttattctaaaaatccagatttagttttggttgatacaaaagttatttcacaagcccctaagcgtttattagcgtctggtattgcagatggtttagcaacttgggttgaggcgcgtgcggttatgcaggcaaatggaaaaactatgttgggacaacagcaaacattggctggagttgcaattgcgaagaaatgtgaagaaacgctgtttgcagatggtttacaggctatggcagcttgtgaagctaaagtggtgacaccagcattagaaaatattgttgaagctaatactttattgagtggtctaggttttgaaagtggaggattagctgcggcgcatgcaattcataatggttttactgcattgacaggtgacattcatcatttaacacatggtgaaaaagtagcttatggaactttagtacaactattattggaaaatagacctaaagaagaacttgataagtatattgagttttacaaaaaaattggtatgccaacaactctaaaagaaatgcatttggatcaagttggatatgatgatttaataaaagttggtaaacaagcaactatggagggtgagacaattcatcagatgccgtttaagatttcgccttcagatgttgctcaagctattatcgctgtagatgcctatgtaaattcaaaataaacaataaggactactgttttccaaatggtagtcttttattgatccctgtattgaattctatagaagattgaaataggatgagaacaaatcgattgggaaagtaaaattaatttctataaatgttttagcaattgtttcgtactatttcagattcagtctactatatgttcttcataaatcaaaaagcgacataggttgtcggctatttattgtgaatacattaattagcattccagttttatcttcggtctaaaataagtattttgtgctatacgagataagcttcttgacttactccttgatttactgcataacaatgggataaaaagtgggagatagagcaattcatagtcatcaaaattaatgagatacagtatacagtttttcctttaaacacatttcaaattccctcaaaaatggtataatagtaacatcacaaaattggagagagaccatgagtttttacaatcataaagaaattgagcctaagtggcagggctactgggcagaacatcatacatttaagacaggaacagatacatcaaaacctaagttttatgcgcttgatatgttcccttatccgtctggagctggtctgcacgtaggacacccagaaggttatactgcaaccgatatcctcagtcgttacaaacgtgcgcaaggctacaatgtccttcacccaatgggttgggatgcttttggtttgcctgcagagcaatacgctatggatactggtaatgacccagcagaatttacagcggaaaacattgccaacttcaaacgtcaaattaatgcgcttggattttcttatgactgggatcgtgaagtcaacacaacagatccaaactactacaagtggactcaatggattttcaccaagctttacgaaaaaggcttggcctatgaagctgaagtgccagtaaactgggttgaggaattgggaactgccattgccaatgaagaagtgcttcctgacggaacttctgagcgtggaggctatccagttgtccgcaaaccaatgcgccaatggatgctcaaaatcacggcttacgcagagcgcttgctcaatgacttagatgaactagattggtcagagtctatcaaggatatgcaacgcaactggattggtaaatcaactggtgccaatgtaactttcaaagtaaaaggaacagacaaggaatttacagtctttactactcgtccggacacacttttcggtgcgactttcactgtcttggctcctgaacatgaattagtagacgctatcacaagttcagagcaagcagaagctgtagcagactataaacaccaagccagccttaagtctgacttggctcgtacagaccttgctaaagaaaaaacaggggtttggactggtgcttatgccatcaaccctgtcaatggtaaggaaatgccaatctggattgcagactatgtccttgctagttatggaacaggtgcggttatggctgtgcctgcccacgaccaacgtgactgggaatttgccaaacaatttgaccttccaatcgtcgaagtacttgaaggtggaaatgtcgaagaagctgcctacacagaggatggcctgcatgtcaattcagacttcctagatggattgaacaaagaagacgctattgccaagattgtggcttggttggaagaaaaaggctgtggtcaggagaaggttacctaccgtctccgcgactggctctttagccgtcaacgttactggggtgagccaattccaatcattcattgggaagatggaacttcaacagctgttcctgaaactgaattgccgcttgtcttgcctgtaaccaaggatatccgtccttcaggtactggtgaaagtccactagctaacttgacagattggcttgaagtgactcgtgaagatggtgtcaaaggtcgtcgtgaaaccaacactatgccacaatgggctggttcaagctggtactacctccgctatattgacccgcacaatactgagaaattggctgatgaggacctcctcaaacaatggttgccagtagatatctacgtgggtggtgcggaacatgctgtacttcacttgctttatgctcgtttctggcataaattcctctatgacctcggtgttgttccgactaaggaaccattccaaaaactctttaaccaagggatgattttgggaacaagctaccgtgaccaccgtggtgctcttgtggcaaccgacaaggttgaaaaacgtgatggttccttcttccatgtagaaacaggggaagagttggagcaagcgccagccaagatgtctaaatcgctcaagaacgttgttaacccagacgatgtggtggaacaatacggtgccgatacccttcgtgtttatgaaatgtttatgggaccactcgatgcttcgattgcttggtcagaagaaggtttggaaggaagccgtaagttccttgaccgagtttaccgtttgattacaagtaaagaaatccttgcggaaaacaatggtgctcttgacaaggtttacaacgaaacagtcaaagctgttactgagcaaattgagtctctcaaattcaacacagctattgcccaacttatggtctttgtcaatgctgctaacaaggaagataagctttatgttgactatgccaaaggctttattcaattgattgcaccatttgcacctcacttggcagaagaactctggcaaacagtcgcagaaacaggtgagtcaatctcttatgtagcttggccaacttgggacgaaagcaaattggttgaagatgaaattgaaattgtcgtccaaatcaaaggaaaagttcgtgccaaactcatggttgctaaagatctatcacgtgaagaattacaagaaatcgctttagctgatgaaaaagtcaaagcagaaattgacggtaaggaaatcgtgaaagtaattgcggtaccgaataaactcgttaatatcgtcgttaaataacgagtttattagctctatctgccaccttcaatagtccactggactattgaagccaactaaattagttaacattgttgtgaaataagataggagtccttcagagtagaatctggaggattttttgaatcttcttatgaaagtatgatatactatgggcaactataaagtttgaaaagtgaaataaggagaataagatgccagtaaatgaatatggtcaaatgattggggagtcaatggaagcttatactccaggtgaattgccttcttttgatttcttagaagggcgttatgctaggatagaggctctttcagtggaaaagcatgcggaggatttattagctgtttatggccctgatacgcctcgggagatgtggacctacctctttcaggagtcagtagcagacatggaggaactggtcagccttttaaatcagatgttggctcgtaaggaccgtttttattatgcaatcatagacaaggcaactggtaaggctttgggaactttttccctcatgcgaattgatcagaataaccgagtaatagaagtgggagctgtcactttttctccagagctcagggggacacggataggaacagaagcccagtatctcttggcttgctatgtctttgaggagcttaactatcgtcgctatgagtggaaatgcgatgctcttaacctgccatccagacgagcagcggaacgtttgggatttatttatgaaggaaccttccgtcaggcagtggtttataaggggcgtacaagagatacggattggttgtctatgattgataaggactggcctcaagtcaaagctcgattggaaatatggttgcgtcctgaaaactttgataaaaatggacgacagcacaagagcttgagagaactttaagaggtgttgagatgattactattaaaaagcaagaaattgtcaagctagaggatgttttgcatctctatcaggctgtcggttggacaaactatacccatcaaacagagatgctggagcaggccttatctcattcattagtaatttatctggcacttgatggtgatgctgtggtgggcttgattcgtttggttggagatggtttttcatcagtttttgtacaggatttgattgttttgcctagctatcagcgtcaagggattggtagctccttgatgaaagaggctttaggaaattttaaagaggcctatcaagtccagctggcgacagaagagacagaaaaaaacgtgggattttatcgttctatgggctttgaaatcttatccacctatgactgtacaggaatgatttggataaacagagaaaaataaaaaaacttgtttgttcttaagcaaagtttaaggatggtctagtatcatatagtcattaaataaagacctcctaactttatttaataaaatcctaaacttttttcatcacaatctcctaatgaagccacccaatcaggtggcttttttgcggtacgacgggcatgtcgtatatctgaggtgtaagtcctcagcctgactatcgtgaggtagcagggagaggaagggatagcgaaatcgtggctctacgaacaggaacgtgatagtaaggcgtatatagcggataaggaggcttcaaactctaaagtccaaaaaggtagtcgtaacctatatgtgtaaatcacgagagtaattgaattcggactaaggtttgtgtgaaaaagataaatctttctagagtctaaagactctgcgtcagatttcctattttcactgtaaccttttaacgtcctcatatcttgtataaacgaggaaagatgtacgacttatcccgtgaggtttcatgagcgctgaaagcgtagtaacaacgaatcatgagaagtcagccgagcccatagtagtgaggaaacttccgtaatggaagtggagcgaaggggtgaatactcaaacagtctggggagagactgtttgaggtctgtcgctagaaagagaaaacgacagatcgaagtaatcctacttcacttgtgtctgtaaaatgagtggtctgatagaactggactttgacacgtaatgactagatgaaggttcaccaatataagatgtccctcaggcaccaaaataagaaaggaatacgcacatgtcaaaactgctagataagatattatcacgcgaaaatatgctggaagcctacaatcaagtaaaatccaataaaggctcagctgggattgatggaatgactatcgaagagatggataattatctcagacaaaactggcgcttgactaaggaactgataaaacagagaaaatataagcctcaaccagttcttagagttgagatacctaaaccagacggaggcatccgtcaactaggaattccaacagttatggatagaatgattcaacaggccattgtccaagtcatgagccccatttgtgaaccccatttctcagatacgagttatggtttcagaccaaataggtcatgtgaaaaagccatcatgaagctcttagaatacttaaatgacggctatgagtggatagtggattagacctagagaaatttttcgatacagttcctcaagatagattgatgtccttagtacataacattatcgaagacggagatacggaatccttgattcgtaagtatcttcattcaggtgttatcattaatggtcaacgttataaaacactagttggtacaccacagggaggaaatttatctcctctcttatccaatatcatgcttaatgaattggacaaggaattagaaaagaggggacttcgatttgtgcgctacgcagatgattgtgtgattacggtcggaagcgaggcagcctctaagcgtgtgatgtattcagtcagtcgttttattgagaaacggctaggtttgaaagtaaacatgaccaagagagttgaaatatctaggttttgggttctggaaattatcagatggttggaaaagccgtccacatcaagatagtgttcggagatttaagtttaaattgaagaaactaacacagaggaaatggagtatagacctaacaagacgtattgagcaactgaatttgtctattcgaggatggataaactattgctcattgggaaatatgaaaagtatagtcgccagcatagatgagcgcttgcgtactcgcctacgagtgattatctggaagcaatggaagaagaaatcgagacgattatggggattgcttaagttaggagttcctaaatggatagcagataaggtatctggctggggcgaccattatcaattagtagctcagaagtcggtacttaaacgtgctatatcaaaaccagtcctggaaaaacgtggactggtttcgtgtttggattattaccttgaacgacatgcgttaaaagttagttgaaccgccgtatgccaaacggcacgtacggtggtgtgagaggggctagagattatcccctactcgattggtgaggtgctggtgatagaaattttttgcaaaatagtaaaattttagaaaagttaagctagttttaagtttcgtcttgtatcatgtagttattaaataaagacctcctaactttatttaataaaatcctaaacttttctttttcataataatctcccttaactccaccgaatcaggtggagttttttagctctatttcaggatttttgggactattctaaaaataatttttcgatatttttcggtatttttcggattttggtcggggaattggcggggactttttgagattttggcggggatttttttagcgaatatgactaagaaataggtctgtggtcgcttcagctagttcaaactcaatttgattgtaagtgactgttaattgaaggactggaactactgtaataatgattttgcttgtctagtagtggcgtattaaatgagaagtgacatgtaagattgtctcttcgtttacgaaatcaaaatttctatgaaattgatagaatccctaacgttctcttaatcttaaccgtcttgtcgtacagcggttgaagaaaatgtaaagttttgacaaaattcgtgaactatgggataataaaaaggaattgagtactagttctatatcataggctagaaaagaccccaagctcacgaccaaataagcttgaggtcttttttgacactatttgtccttgtttagccatttatcgactatacgaagaacgacaccgaccacaattggtccgataatagttttgagtactaattccatcatgggctatctcacctcctttcgtaggcggtgtagaagtgccgtataatattataccacataagtgctaaacttaggagtcacccaatcaggtggcttttttgtttgtggcttgttttttttgatataatagagccatgagtagaattttagataatgagatgatgggtgatgaggagttagtagaacgcacgctccgtcctcagtatttacgtgaatatattggtcaggataaggttaaggatcaacttcagatctttatcgaagccgctaaaatgcgggatgaagcgctggatcatgtgctcttatttggccctccagggcttgggaaaacaaccatggcttttgtcattgccaatgaactgggagtcaatctcaagcaaacgtctggtcctgttatcgaaaaagcgggtgatttggtagcgattttgaatgatttagagcctggagatgtcctctttattgacgagattcatcgcttacccatgtcagtggaagaagtgctttatagtgccatggaggacttctacatcgatattatgattggggctggtgaaggcagtcgcagtgttcatttggagttgcctccttttaccttgattggtgcgacgactcgggctggtatgctctcaaatccactacgggcacgttttgggattacaggtcatatggagtattatgctcatgctgacttgacagaaattgtcgagcggacggcagatatttttgagatggaaatcacccatgaggcagcatctgagttggccctacgtagtcgtggaacccctcgtattgccaatcgtctcctcaagcgcgtgcgcgattttgcccagataatggggaatggggttatcgatgatgttattaccgataaggctttgactatgctggatgttgaccatgaaggtttggactatgtggatcaaaaaatccttcgcaccatgattgagatgtacagtggaggacctgttggtctaggaactctttctgtgaatatcgccgaagagcgtgagacagttgaagacatgtatgagccttacttgattcaaaaaggttttatcatgcggacacggtctggacgggtggcgactgctaaggcatatgagcacttaggttatgaatacagtgaaaaataagcaagaaatcttagaggcttttagagaaagtccagatatgatggccattctgacgatcatccgagaccttggtttgaaagactcgtggttggcagcaggttctgtcagaaatttcatctggaatcttttgtcagacaaatccccttttgatcatgaaacagatatagatgtgattttctttgatccagatttttcttatgaggaaaccttattactggagaaaaagctgagagaggattttcctcagtaccagtgggaattgaaaaatcaggtctatatgcatcagcacagtcctcacactgcttcctataccagttctcgtgatgctatgagtaagtatccagaacggtgtacggcagttggactgcgcttgaatgaagaattagattttgaactctatgtaccttatggtttggaggatattttgaattttcaagttcgtccaactcctcatttcttagaaaatgaagaccgaatggaactctatcaaacacgtttatccaagaaaaattggcaggagaaatggaaaaatttgatttttaaaaatacttaaggaaactttaagctagggagtgtacactaagttcataagttaagaagaccttaacttaaactcctaaaactttttcataataatctccctataaaaataaagtcgcccaatcaggcggcttatttttttgaaaaatgggcttggtgcctgagaataaatagcttagtgatagaagaaaatggggaaatatggtataatgaaacgatagatttttgaataggaataagatcatgtttggattttttaagaaagataaggctgtggaagtagaggttccgacacaggttcctgctcatatcggcatcatcatggatggcaatggccgttgggctaaaaaacgtatgcaaccgcgagtttttggacataaggcgggcatggaagcattgcaaaccgtgaccaaggcagccaacaaactgggcgtcaaggttattacggtctatgctttttctacggaaaactggacccgtccagatcaggaagtcaagtttatcatgaacttgccagtagagttttatgataattatgtcccggaactacatgcgaataatgttaagattcaaatgattggggagacagaccgcctgcctaagcaaacctttgaagctttaaccaaggctgaggaattgactaagaacaacacaggattgattcttaattttgctcttaactatggtggacgtgctgagattacacaggcgcttaagttgatttcccaggatgttttagatgccaaaatcaacccaggtgacatcacagaggaattgattggtaactatctctttactcagcatttgcctaaggacttacgagacccagacttgattatccgtactagtggagaattacgtttgagcaatttccttccatggcagggagcctatagtgagctttattttacggacaccttatggcctgattttgacgaagcggccttgcaggaagctattcttgcctataatcgtcgtcatcgccgatttggaggagtttaggaggaaatatgacccaggatttacagaaaagaaccttgtttgcagggattgccctggctattttcctaccaattttaatgattgggggcctcttgcttcagatagcaatcggaatcatagccatgctagccatgcatgaacttttgaagatgagaggtctagagaccatgacgatggagggcctcttgaccctctttgcaacctttgcattgaccattcccttggagaattacctgacttttttgccagttgatgggaatgtggttgcctatagtgttttgatttcaatcatgttaggaacgaccgtttttagcaagtcttatacgattgaggatgcggttttccctcttgctatgagcttctacgtgggctttggatttaatgctttactagatgctcgtgttgcaggtttggacaaggctctcttagccttgtgtatcgtctgggcgacagacagtggtgcctatcttgttgggatgaactatgggaaacgaaagttagcaccaagggtatcgcctaataaaacccttgagggtgccttgggtggtattttaggagcaattttagtaaccattatccttatgatagttgacagtacagttgctcttccatatggaatttacaagatgtcagtctttgctattttctttagcattgctggacaatttggtgatttactagaaagttcgatcaaacgtcattttggtgttaaggattctgggaaatttatccctggacatggtggtgttttggatcgtttcgatagtatgttgcttgtatttccaatcatgcacttatttggactcttttaatcaaaagacggaggaaacgctatgctcggaattttaacctttattctggttttcgggattattgtagtggtgcacgagttcggtcacttctactttgccaagaaatcagggattttagtacgtgaatttgccatcggtatgggacctaaaatttttgctcacattggcaaggatggaacggcctataccattcgaatcttgcctctgggtggctatgtccgcatggccggttggggtgatgatacaactgaaatcaagacaggaacgcctgttagtttgacacttgctgatgatggtaaggttaaacgcatcaatctctcaggtaaaaaattggatcaaacagccctccctatgcaggtgacccagtttgattttgaagacaagctctttatcaaaggattggttctggaagaagaaaaaacatttgcagtggatcacgatgcaacggttgtggaagcagatggtactgaggttcggattgcacctttagatgttcaatatcaaaatgcgactatctggggcaaactgattaccaattttgcaggtcctatgaacaattttatcttaggtgtcgttgttttttgggttttaatctttatgcagggtggtgtcagagatgttgataccaatcagttccatatcatgccccaaggtgccttggccaaggtaggagtaccagaaatggcacaaattaccaagattggctcacatgaggttagcaactgggaaagcttgatccaagctgtggaaacagaaaccaaagataagacggcaccgactttggatgtgactatttctgaaaaggggagtgacaaacaagtcactgttacacccaaagatagtcaaggtcgttaccttctaggtgttcaaccgggggttaagtcagattttctatccatgtttgtaggtggttttacaactgctgctgactcagctctccgaattctctcagctctgaaaaatctgattttccaaccagatttgaacaagttgggtggacctgttgctatctttaaggcaagtagtgatgctgctaaaaatggaattgaaaatatcttgtacttcttggcaatgatttccatcaatattgggatttttaatcttattccgattccagccttggatggtggtaagattgtgctcaatatcctagaagccatccgccgcaaaccattgaaacaagaaattgaaacctatgtcaccttggccggagtggtcatcatggttgtcttgatgattgctgtgacttggaatgacattatgcgactcttttttagataatcgaggaatattatgaaacaaagtaaaatgcctatcccaacgcttcgcgaaatgccaagcgatgctcaagttatcagccatgctcttatgttgcgtgctggttatgttcgccaagtttcagcaggtgtttattcttatctaccacttgccaaccgtgtgattgaaaaagctaaaaacatcatgcgccaagaattcgaaaagattggtgctgttgagatgttggctccagcccttcttagtgcagaattgtggcgtgaatcaggtcgttacgaaacctatggtgaagacctttacaaactaaaaaaccgtgaaaaatcagactttatcttaggtccaactcacgaagaaacctttacagctattgtccgtgattctgttaaatcttacaagcaattgccactcaacctttatcaaattcagcccaagtatcgtgatgaaaaacgcccgcgtaatggacttcttcgtacacgtgagtttatcatgaaggatgcttatagtttccacgctaactatgatagtttggatagtgtttatgatgagtacaaagcagcctatgagcgtattttcactcgtagtggtttagacttcaaggctattattggtgacggtggagccatgggtggtaaggatagccaagaatttatggccattacatctgctcgtacagaccttgaccgctgggttgtcttggacaagtcagttgcctcatttgacgaaattcctgcagaagtgcaagaagaaatcaaggcagaattgctcaaatggatagtctctggtgaagataccattgcttactcaagtgagtctagctatgcagctaacttagaaatggcaacaaacgagtacaaaccaagcaaccgtgttgtcgctgaagaagaagttactcgtgttgcaacgccagatgttaaatcaattgatgaagttgcagccttcctcaatgttccagaagaacaaacgattaaaaccctcttctacattgcagatggtgagcttgttgcagcccttctagttggaaatgaccaactcaacgaagtcaagttgaaaaatcacttgggagcagatttctttgacgttgctagcgaagaagaagtggcgaatgttgttcaagcaggatttggttcacttggaccagttggtttgccagagaatattaaaattattgcagatcgtaaggtacaagatgttcgcaatgcagttgtcggtgctaacgaagatgactaccacttgactggtgtgaacccaggccgtgattttactgcagaatatgtggatatccgtgaagttcgtgagggtgaaatttccccagatggacaaggtgtccttaactttgcgcgtggtattgagatcggtcatattttcaaactcggaactcgctattcagcaagcatgggagcagatgtcttggatgaaaatggtcgtgctgtgccaatcatcatgggatgttacggtatcggtgtcagccgtcttctttcagcagtgatggagcaacacgctcgcctctttgttaacaaaacgccaaaaggtgaataccgttacgcttggggaatcaatttccctaaagaattggcaccatttgatgtgcatttgattactgtcaatgtcaaggatgaagaagcgcaagccttgacagaaaaacttgaagcaagcttgatgggagctggttatgaagtcttgacagatgaccgtaacgaacgtgtcggtgttaaatttagcgatagtgacttgattggtcttccaatccgtatcactgttggtaaaaaagcggccgatggcattgtagaagttaagatcaaggcaactggtgacaccattgaggttcatgcagataacgtgcttgaaacgcttgaaatcctaagcaagaaataaaaactataatcagaagaaaaacaaggaaaaaatgtaactagtttttaccttgttttttctgtataatgggagaaatgagtagataaagaggtaaatgtatgctaagatttccaaaggattttgtctggggatcctctacttctggaccgcagacagaaggacgtgtagctggtgacggtaagggagacaatctctgggattactggttccaagtggagccaaatcgttactataatgggattggttcagataagacatcgactttttatgaaaattgggagcgggatattgagcttttgttagagactggtcacacagcctttcggacttctattcagtggtcacggatttttccacaaggctgtggaaaagtcaacactcaaggtgtggatttttatcgtaaggtctttgaggctattaaggctaaaggaattcgtctgttagtcaatctctatcattttgatttaccttttgcccttcaagaggatggtgatggttgggaaaataaggcgacagtctcagcctatgaagactatgctcgtttttgttttgagacttatggagatttagtggatcaatggattacctttaacgagcccatcgttcctgtagaatttggttatttttatgatgcccattatccacataaggtggatgcagaggcagctgttaaggtagcctatcatacacaattggccagcagccgggctgttaaggcttgccatgaacttttgcctgattccaagattgggattgtcctcaacttgacaccggcttatccacgtagccagcatcctgctgatgtcaaggcagctcgtattgcggccctttttcaggcccaatctttcttagatccatctgtcttggggacttatccacaggagttggtagaaatcttgcatgaacacggtcttttacctgatgctacagaggaagagttggaactcattcgtgataatacggtggacttccttggtgtgaactactatcaacctttgcgtgttatggctcctcgatttgctaagcatccagagagtccactcttaccagaacatttttacgagccttatgtgatgcctggacgtaaaatcaattctcaccgtggttgggagatttatgagcaagggatttatgacatcgcccaaaatatcaaggaaaattatggcaatattgagtggatgttgactgagaatggtatgggtgttgaaggggaagaaaaattccgtcaagatggaatgattcaagatgattaccgtattgactttgtaaaaggtcatcttcgtgaacttcaccgtgccattgaagatggtgccaactgtaagggctacttgatttggacctttattgactgctggtcatggctcaacagctataaaaatcgctatggtttggtcgaattagacttggaaacgcaagaacgtcgtctgaagaaatcaggccactggttcaaagaattaagcgataataatggattttaaaaaggactctgactgattatcccaatcggtcagagtttttatgcttacaggagcttaatttgaactataccaatttttactcttgacaagtgaaagaaacaagtatatactgtttttgctgattctataaaagatgaattagactataccaattttaaggagaaagcacagcttgcctgtgtcgtatatactatgtgtggaattgttggtgttgttggaaacacaaatgcaactgatattttgattcaagggcttgaaaagcttgaataccgtggctatgattctgcgggaatttttgtcctagatggtgctgataaccatttggtgaaggcggttggtcgtattgcagaattgtctgccaagacagctggtgttgagggaacaactggtatcggacatactcgttgggctactcacggaaaaccaactgaggacaatgctcacccacaccgctctgagacggaacgttttgtcttggtgcataatggggtgattgagaactatcttgaaatcaaggaagaataccttgcaggtcaccacttcaaggggcagacagatactgaaatagccgttcatttgattggaaaatttgcggaagaagaagggctctcagttcttgaagccttcaaaaaagcccttcacatcatccgtggttcttatgcctttgccttggttgactcacaagatcctgaagtcatctacgtagctaaaaataaatcaccacttttgattggtcttggagaaggctataacatggtctgctcagacgccatggctatgattcgtgaaactaaccaatacatggaaatccatgaccaagagttggtaatcgtcaaggctgatagtgtggaagttcaagactatgatggaaatcgtcgtgagcgtgctagctacactgctgaacttgacttgtcagatatcggtaagggaacttacccttactacatgctcaaggaaattgacgagcaaccaactgttatgcggaaactcatccaagcctacacagatgaggctggtcaagttgtcgtagacccagatatcattaaggctgttcaagacgcagaccgcatctacatccttgcagctggaacatcttaccatgcaggatttgcttctaagaaaatgttggaagaattgacagatacaccagttgaacttggaatctcatctgagtggggctacggtatgccacttctcagcaagaaaccactcttcatctttatcagccaatctggtgaaacagcggatagtcgtcaagttttggtcaaggctaatgaaatgggaattccaagcttaacagtgacaaacgttccaggttcaaccctctcacgtgaagccaactataccatgctccttcacgcaggtcctgaaattgccgtggcatcaactaaagcctatacagcgcaaatcgcagcccttgccttccttgcaaaagcagtcggagaagcaaatggtaatgctaaagcgcaagcctttgacctggttcatgaattgtcaatcgtagctcagtctatcgaatcaactctttcagagaaagaaaccattgaagtcaaggttcgtgaacttcttgaaacaactcgtaacgccttttacatcggacgtggtcaagattactacgtagccatggaagcaagtctcaaactcaaagagatttcttatatccagtgtgaaggctttgctgcaggagaactcaagcacggaaccattgccttgattgaagaaggaacgcctgttttggctctcttgtcagatccagttcttgccaatcatactcgtggaaatatccaagaggtcgcagcccgtggtgccaaagtcctcactatcgcagaagagaatgtagccaaagataccgacgatatcgtccttacgaccgtacatccatacctctcaccaatttcaatggtcgtaccaacgcaattagtcgcttactttgcaaccctccaccgtggcctcgatgtggacaaaccacgtaaccttgccaagtcagtaacggtagaataagctaaaaaagtctagttatctaggctttttctaatgagcaaatcggttgcttgtactcaagattcgtgttagaataatttttcaaattgaagtacagagatagataaggagaatcacaatggtagaattgggaatttcaacatttggggaaataacggagcttgaagggactggacaaacttacagtcatgctgaacgcattcgccagttggtggcagagattgagctggctgacaaggttggtttggatgtatatgggattggtgagcaccatcgggcggattttgcagtatcagccccagagattgttctggccgctggggcagtcaataccaagaaaatccgtttgaccagtgcagtcagcattctgtcaagcatggacccgattcgtttgttccaacagtatgccactatcgatgctttgtcaaatggacgatcggagattatggctggaaggggctctttcacggaatctttccctctgtttggttatgacttgaaagactacgactctctttttgatgagaaattagacttgcttcagttagtcaatgaaaagaccaagttagactggcaaggtcgattgactcaaacgattgctggtaaagaagtttatcctcgtccagttcaggacaaattgcccttgtggatagctacaggtggtcatgtcgaatcaacagtgaagattgctcaggctggtctaccgattgtatatgctattattggtggtaatccacgttattttaaaaagttgattcaggcttatcgtgagattggaagcgaagcgggccatgctgacaaagacttgaaagtgggagcccattcttgggggtggattgcggaagatggtgagcaggcggtgaaagattatttccatccgactaagcaagtggtggatgctatttccaaagaccgtccgcactggcaggaattgcgttatgagcaatatttggagcaggtagggccaaatggcgccatgtttgttggcaatccagatcaggtggccgaaaaattgattcgcatgatagaggatttaggattggaccgcttcatgcttcatctaccgcttggttctatgcctcatgaccaggttctgagagctattgaactcttcggaacacaagttgcacccaaagtacgagcttattttgctatgaaagaggcttaataaaaaatcctaatcaagtttattaggacaacaaatattgtacaaaaattaatcccccgagctataatgcttgggggatttttctataggagggctagtttagttctcttttttattttttagtaagaaaccgagaccaaggagcgcaaggaggctgattcctgcaaataggagtttgttttcgtttttgattcctgtatttggaagttcagcttgtttatctggggttgcaggtatattttccttgctagagttttctaccgattcgtttcgaaccgcttcttttacagatgatgcttgtgcttcttgtgctggttgttcagcttgtgaatcagctgtagcttggctaggtttattttccgcatcagctactttggcatctggtttagtagaatcaggtctagcttctggagctgggtcttgatgtgcagggtgagaagcttcattttgatgttcaggcttggaaggggttgagtctggtttctcttctgcagttgactcatggctagttccattttgagagactcgaagaacagtagctgtaagggcattcaatttcaagcctttttcagtccattcaagtcctttcgggttggcaattccgactggtcctgcttggttttcatctgccaaaacttccgcatttcttagatgtgcaaaggcagttcccaaattaaattcgcgagctttttcatccgcattgacaaagactgcgtagatatcgccgtttggagcagtgatttggtagccaatcactacatcctctttttccacaccattttggcctgggacagtgatgaggtggacacggtctttgatatcttgaagactcttaagtcggaaggcatctgtagattgacgaagggcaatcaaacctttcatatagtcacggctcttgacattttcaggataagctttaccatctgtagccttagtccagtcaaacttgttgactgcatcactagaatcgtaagagtcatggatgaagtaaggatagtcaaatgggttgccgtccttatcacgcaacaagtgagatttgtttggaaccttatcctctgctactggagtcttgtaggctgggtcacggaattgtttagtacgtccatattcctgaccggagtggataaatggagttccttgagctgtcaagaccatgagatttccaagtcgtaaacgacggtggatttcagcatagttctcagccttgcttgggtcttttttgatagactgggcaatgatgtcaaagagggtcaagttatcatgggctgcgatgtattggatgacatctccagggctgtcagcttcaaagttagttggttgagcaatgagatttttaaagatggtgttgacatcacgcttgccacctgtgataaaggcaggttgaccttcgtttggataaccagatttgaggttgttacggatgtcatctgaaaagacagcgacagtatcggtatgtttcatccaatcttggtcagcagctttagtaggcatgttttcatcaccggcataggttctccaaccttcaccaagcatgatgaggtttggattgagggcgcgtgcagccttgtaagcttcttcgatagaagcggcgtcatggtctcccatcatatcgaaacggaagccatccactttgtaggtatcaactaggtatttgatagagtcaattaggagccgtttggtcatatggtgggttgtccccaagcgtccaccaccaaagctagttcgaggtgtgccatcggcatccataaagtggtagtagtttggttccaaatcttcaaagagatcgactttggctgtgtggttataaacgacatctaggatagctcccataccacgtttgtggatttcgttgatgaggtttttaaattctgcgattcgtttttctggattcttaggatcgcttgagtacataccagtcaaggagaagtagttttgagggtcatatccccagttgtagttgctgttgcttgaagcgtagtcagacaagcgttcatggtttttcaattcattgacaaagtagtaagacaagactggaaggagctggatatgggttacacccaagtctttgagatagtctagtttttcaatgaaggcttcaaaagtcccaaatggtttggtcaagtcttttgcaatggcaggatctgaagtgaaatcacgcacatgagcttcgtagataacggcgtcttcacgagtcttgaaattgtgaatcttaccataagtcaagtcttgaggtccgagtttagctggatctacaaaggcggctttagccactttatgggcatcgtcaatcttggaatcgtcgctattccaagcagcaagagatttagcgtaaggatcgagtgcaagaacagttttaccttgacgctcgatttggtattgataatagtagccagtgaaatctgtgattccgagtttgtttgtgctgtctagagtttgtttccaagttcctctttcccctttttcaagagcgacagttccaactactttgtcagggtcattcttgtcgtagacaacaacagaaaccttatcagcacttggtgaccaaagggtcaaatcaacttgttttccttcttcttttaggtcagctcccagtttgccatcatagctgtatgtctcatctttcaggcgccagcttgttttggtagtgaattggtcggaattgtagctaacagtataaggatgttttgtgtcagagaaatctccgctgtaggtcactttcttaccagcttcatcgattgcaacatcggtaatagttaccttgtttcctaggtgattagtgatgttggagtgtttgaggatatcttcttttttagcaccgacaagtgttgaaaagctactttcaatgctagaagtgcctacgtgttgggctcctgtcatacggatatcatggacatagtatggatttgtgtaaatcgattcatcatcgtcttttaggaaaatttggctatgatttttcaaatctgtgaacttataattttctttacggattttcacgtcgtctccttgtttgctctcatctagtaataaaaatccaaattctcttgcggcttcattaagaggaatgtcgatatagcggccatatttgcctgtagccgtaaagtctgttccgtcaggccattgagcgctacttggatttttcacatctccccagtaccagagagatttcttgtcatagttgccatctgtgcggtagtagttgacgcgaacagttcctgcaggctgtggctcgtaagagaaaaccttgtaatcttggtctaaccaagcttcgttcatttttggaactagtttttctacagatttatcgccggttagattttttccagctgtattgttgatgaggaagctaattttcttggcttgttctccctttaatttgacatctaggtaatagccgtagtcatctttcttggcatccttgaaggacaaagctccgtttggccagttttcagatggtttttcaacatcgtcccaagtccatagtccttgagcatccttgttttcttcaggaagttttttgacatggatacggaagtagttatcttcgatgggctcttctgccttagtttcagttgttactggactagtagaagtagttggctcacttgaacgatcttgtccagtttgtggtgctggatcggctgggcttgcagcaggtttttcttctgttttctctagggaagcgtttgcatttccaggtgaagaaatatcactttcgttcttaccagagccagctgctgtatcagtaagaggttgggcaagggtggttgtatttctgttgttgggttcgttagtggttggtgtactttcgtcggatgagatagttggtgtagccatggcaagcaagacaaggcttgcgccgataaggacagaaccagttccatttttgagggaacggatgctgtagaccatttttttctcagtgtgagatggtgtttttctcataatgattctccaatcaataaatttctatatcagtatagcatgtagtaaaacaatatgcaagcgttttctttgatttgtgaaagaaattcttacttttgagaagttttccgtactattttatatatcagtataaatgacggagataaaaatgtcacgtaagccaagccgtgttattaggaagatgatgtgttctcagctatttttattcagaaattgatctctaacattaccaataaaaaagaaaaatatcttgacaagcaagggaaaattttgttacaataatagacggtactttttacttttggtctctcaagagtgtacagggacgtgctgacaaatgttgcaaaagtacacacagatgatatctgtcaccaagtgtatcatcaccaaaaataaaaaaacacaggagaatgtagatgcctacaattaaccaattggttcgcaaaccgcgtaaatcaaaagtagaaaaatctaaatcaccagctttgaacgttggttacaatagtcataaaaaagttcaaacaaacgtttcttcaccacaaaaacgtggtgttgcaactcgtgttggaacaatgacacctaaaaaacctaactcagcccttcgtaaattcgctcgtgtacgtttgagcaaccttatcgaagttactgcctacatcccaggtatcggacacaacttgcaagagcacagcgtggtgcttcttcgcggtggacgtgtaaaagaccttccaggggtacgttaccatatcgtccgtggtgcacttgatactgcaggtgttaacgatcgtaaacaaggccgttctaaatacggtactaaacgtccaaaagcataaggaaaggggataaagagaaatgagtcgtaaaaatagagctccaaaacgtgacgtattgccagatccgctatacaattcacaactagttactcgtcttatcaaccgcgttatgcttgatggtaaacgtggtactgctgcttcaatcgtttacggtgcttttgagcaaatcaaagaagctactggcaacgatgcacttgaagtatttgaaacagctatggaaaacatcatgcctgtacttgaagtacgtgcacgtcgtgttggtggttctaactaccaagtcccagttaaagttcgtccagaacgtcgtacaacacttggacttcgttggttggtaacaatcgctcgtcttcgtggtgaacacacaatgcaagaccgtcttgcaaaagaaatcttggatgctgctaacaacactggtgcagcagttaagaaacgtgaagatactcaccgtatggctgaagctaaccgtgcattcgcacacttccgttggtaagataggatgcgaaagcgttaagaaagtcccagagaaaatagggaatcgaagcaggttgcggttgcaaccaatgagattcatctttttctccagacttttagcttgagctcaactaaatcatgatgctaggaacggtaaggatgcaaggtaaaaataggaaactgacgcagtattcgacgaatacaaggagttttatctttttcacgcagcatcccgttccagctcacatcggctaactaactttagcccgggttcaaattagctaaatcgattagtattagctataactcagcttaccatctcgtaagttgaaaccaacaatagcatgaaaacattgagaacgggtaggtcctgcctatccgtttttattaaaatcgtgttataatagaatagaaatcaaaaataaataggagaaacaaacctcatggcacgcgaattttcacttgaaaaaactcgtaatatcggtatcatggctcacgtcgatgccggtaaaacaacaactactgagcgtattctttactacactggtaaaatccacaaaatcggtgaaactcacgaaggtgcgtcacaaatggactggatggagcaagagcaagaacgtggtatcacgatcacatctgctgcgacgacagctcaatggaacaaccaccgcgtaaacatcatcgacacaccaggacacgtggacttcacaatcgaagtacaacgttctcttcgtgtattggatggtgcggttaccgttcttgactcacaatcaggtgttgagcctcaaactgaaacagtttggcgtcaagcaactgagtacggagttccacgtatcgtatttgccaacaaaatggacaaaatcggtgctgacttcctttactctgtaagcacacttcacgatcgtcttcaagcaaatgcacacccaatccaattgccaatcggttctgaagatgacttccgtggtatcattgacttgatcaagatgaaagctgaaatctatactaacgaccttggtacggatatccttgaagaagacatcccagctgaataccttgaccaagctcaagaataccgtgaaaaattgattgaagcagttgctgaaactgacgaagaattgatgatgaaatacctcgaaggtgaagaaatcactaacgaagaattgaaagctggtatccgtaaagcgactatcaacgttgaattcttcccagtattgtgtggttcagccttcaaaaacaaaggtgttcaattgatgcttgatgcggttatcgactaccttccaagcccacttgacatcccagcaatcaaaggtattaacccagatacagacgctgaagaaattcgtccagcatctgacgaagagccatttgcagctcttgccttcaagatcatgactgacccattcgtaggtcgtttgacattcttccgtgtttactcaggtgttcttcaatcaggttcatacgtattgaatacttctaaaggtaaacgtgaacgtatcggacgtatccttcaaatgcacgctaacagccgtcaagaaatcgacactgtttactcaggtgatatcgctgctgccgttggtttgaaagatactacaactggtgactcattgacagatgaaaaagctaaaatcatccttgagtcaatcaacgttccagaaccagttatccaattgatggttgagccaaaatctaaagctgaccaagacaagatgggtatcgcccttcaaaaattggctgaagaagatccaacattccgcgttgaaacaaacgttgaaactggtgaaacagttatctcaggtatgggtgaacttcaccttgacgtccttgttgatcgtatgcgtcgtgagttcaaagttgaagcgaacgtaggtgctcctcaagtatcttaccgtgaaacattccgcgcttctactcaagcacgtggattcttcaaacgtcagtctggtggtaaaggtcaattcggtgatgtatggattgaatttactccaaacgaagaaggtaaaggattcgaattcgaaaacgcaatcgtcggtggtgtggttcctcgtgaatttatcccagcggttgaaaaaggtttggtagaatctatggctaacggtgttcttgcaggttacccaatggttgacgttaaagctaagctttatgatggttcatatcacgatgtcgactcatctgaaactgccttcaagattgcggcttcactttcccttaaagaagctgctaaatcagcacaaccagctatccttgaaccaatgatgcttgtaacaatcactgttccagaagaaaaccttggtgatgttatgggtcacgtaactgctcgtcgtggacgtgtagatggtatggaagcacacggtaacagccaaatcgttcgtgcttacgttccacttgctgaaatgttcggttacgcaacagttcttcgttctgcatctcaaggacgtggtacattcatgatggtatttgaccactacgaagatgtacctaagtcagtacaagaagaaattattaagaaaaataaaggtgaagactaatccgtcctcactctagaaggaagtcacttagtggcttccttttgtctttagaaaatacctctaaatatggtaaaatagtagaagaataatgtgaggaaaatgaatgtcaaatagttttgaaattttgatgaatcaattggggatgcctgctgaaatgagacaggctcctgctttagcacaggccaatattgagcgagttgtggttcataaaattagtaaggtatgggagtttcatttcgtattttctaatattttaccgattgaaatctttttagaattaaagaaaggtttgagcgaagaattttctaagacaggcaataaagctgtttttgaaattaaggctcggtctcaagaattttcaaatcagctcttgcagtcctactatagggaggctttctctgaaggtccatgtgctagtcaaggttttaagtccctttatcaaaatttgcaagttcgtgctgagggtaatcagctatttattgaaggatctgaagcgattgataaggaacattttaagaagaatcatcttcctaatttagccaaacaacttgaaaagtttggttttccaacttttaactgtcaagtcgagaagaatgatgtcctgacccaagagcaggaagaggcctttcatgctgaaaatgagcagattgttcaagctgccaatgaggaagcgctccgtgctatggaacaactggagcagatggcacctcctccagcggaagagaaaccagcctttgattttcaagcgaaaaaagctgcagctaaacccaagctggataaggcggagattactcctatgatcgaagtgacgacagaggaaaatcgtctggtatttgaaggggttgtttttgatgtggagcaaaaagtgactagaacaggtcgtgttttaatcaactttaaaatgacggactatacttcaagtttttctatgcaaaagtgggttaaaaacgaggaagaggcccagaagtttgacctcatcaagaagaattcttggctccgagttcgagggaatgtggagatgaataacttcacacgcgatttgactatgaacgtacaggatctgcaggaagttgttcactatgagcggaaggatttgatgccagaaggtgagcgtcgggttgagtttcatgctcatactaacatgtcgactatggatgctttgccagaggtcgaagagattgttgcaacagctgctaagtggggacacaaggcggttgctatcacggaccatgggaatgtccagtcctttccacatggctataaggcggctaagaaagcgggaatccagctgatctatgggatggaagccaatatcgtggaggaccgtgtccctatcgtctataacgaagtggagatggacttgtcagaagcaacctacgtggtctttgacgtggaaacgacgggactttcagctatctataatgacttgattcaggttgcggcttctaagatgtacaaggggaatgttattgctgaatttgatgaatttatcaatcctgggcatcccttgtcagcctttactacagagttaactggaattacagatgatcatgtcaaaaatgccaaaccactagaacaagttttgcaagaattccaagaattttgcaaggatacggtcctagttgcccacaatgctacctttgacgttggctttatgaatgctaattatgagcggcatgatcttccaaagattagtcagccagttattgatacgctggagtttgctagaaacctctatcctgagtataaacgccatggtttggggcctttgaccaagcgttttggtgtggccttggaacatcaccacatggccaactacgatgcggaagcgactggtcgtctgcttttcatctttatcaaagaggtagcagaaaaacatggtgtgaccgatttagctagactcaacattgatctaatcagtccagattcttacaaaaaagctcggatcaagcatgcgaccatctatgtcaagaatcaggtaggtctaaaaaatatctttaagctggtttccttgtctaataccaagtattttgaaggagtgccacggattccgagaacggttctagatgcccatcgagagggcttgattttaggttcagcctgttcagagggtgaagtttttgacgtggtcgtttctcaaggtgtggatgcggcggttgaggtggccaagtattatgattttatcgaggtcatgccaccggctatctatgcacccttgattgccaaagagcaggtcaaggatatggaggaactccagaccattatcaagagtttgatagaggttggagaccgccttggcaagcctgttctggctacgggaaatgttcactatatcgaaccggaagaagagatttatcgtgaaattatcgtccgtagtttgggacagggtgcgatgattaatcgaactatcggtcatggtgaacatgcccaaccagcaccacttccaaaggctcattttcgaacgactaatgagatgttggatgaatttgcctttttgggagaggaactggctcgtaaactggttattgaaaacaccaatgccttggcagaaatatttgaatccgttgaagtcgttaagggtgacttgtatacgcctttcatcgacaaggctgaagaaacagttgctgagttgacctataagaaagcttttgagatttatggaaatccgctgccagatattgttgatttgcggattgaaaaagaattaacatccatactggggaatggatttgctgtgatttatctggcatcgcagatgctggtgcaacgttctaatgaacggggttatttggttggttctcgtgggtctgtcggatctagtttcgttgcgaccatgattgggattacggaggtcaatcctctctctcctcactatgtctgtggtcagtgtcagtacagtgagtttatcacagatggttcgtacggttcaggatttgatatgccccataaggactgtccaaactgtggtcacaaactcagtaaaaacggacaggatattccgtttgagaccttccttggttttgatggggataaggttcctgatattgacttgaacttctcgggagaagatcagcctagcgcccacttggatgtgcgtgatatctttggtgaagaatatgccttccgtgcgggaacggttggtacggtagctgccaagactgcctatggatttgtcaaaggttacgagcgagattatggcaagttttatcgtgatgcagaagtagaacgcctcgctcaaggagcggcgggtgtcaagcggacaacaggccaacacccggggggaatcgttgttattccgaactacatggatgtctacgattttacgcctgtccagtatccagcagatgatgtcacggctgaatggcagaccactcactttaacttccacgatatcgatgagaacgtcctcaaactcgatgtactgggacatgatgatccgactatgattcgaaaacttcaggatttgtctggtattgaccctaataaaattcctatggatgacgaaggcgtgatggcactcttttctgggactgatgtgctaggggtaacacctgaacaaattggaacgcctacgggtatgttggggattccagagtttggaacaaatttcgtacgtggaatggtagacgaaacccatccgacaacctttgcggaattgcttcagctgtctggtctgtcccacggtactgatgtttggttggggaatgctcaggatctgattaagcaaggaatagcggacctatcgactgttatcggttgtcgggacgacatcatggtttacctcatgcatgcgggtctggaacctaagatggcctttaccattatggaacgggtacgtaagggtttgtggctaaagatttcagaagaggagagaaatggctatatcgaagcaatgaaggctaataaggtgccagagtggtatatcgaatcctgtgggaaaattaagtacatgttccctaaggcccatgcggcagcctacgttatgatggccttgcgtgtagcttacttcaaggttcaccatcctatttattactactgtgcttacttctccattcgtgctaaggcttttgatatcaagaccatgggtgcgggcttggaggtcatcaagcgcagaatggaagaaatctctgaaaaacggaagaacaatgaagcctctaatgtggaaatcgatctctatacaactcttgagattgtcaatgagatgtgggaacgaggtttcaagtttggtaaattagatctctactgtagtcaggcgacagagttcctcatcgacggggatacccttatcccaccatttgtagcaatggatggtctgggagagaacgttgccaagcaactggtgcgggcgcgtgaagagggagaattcctctctaaaacagaactacgcaagcgtggtggactctcatcaaccttggttgaaaagatggatgagatgggtattcttggaaatatgccagaggataaccagttgagtttgtttgatgagttgttttaaaaaattgcttaataatctattaaaagaggctaacgtatatccaatagatttacattagctttcttttttgttaaaatagtctatggaaagagggtgagagtatgtcaaagatgagtataagcatccgtctggatagtgaggttaaggagcaggcccaacaggtgtttagtaatctgggaatggatatgacaacagctattaatattttccttcgtcaggcaattcaatatcagggattaccttttgatgttagactagacgaaaatcggaagttgctccaagcgttaacggatttagaccaaaatcgtaatatgagccagtcttttgaatcagtctcagatttgatggaggacttacgtgcttaagattcgttatcataaacagtttaaaaaagattttaagttggctatgaagcgtggtttgaaggcagaattattagaagaagttttgaattttctggttcaagaaaaagaacatcctgccagaaatcgtgatcattcattgacggcatccaagcattttcaaggagttcgtgaatgccatacccagccagattggcttttggtttataaagtagacaagtcggaattgattttaaatttgctgaggacaggcagtcacagtgatttattttaatctattttaagggggttctcatgaaactaagaatatttgcggaagataagccggctaagaaggtatttgaatatcaattagaacttgctgatcgtacaattcttctatcgacagcactcttgtcaggtgctattgctttagcaggaatcttttctgctttgaaagaaaaataaaaatagaaaagagaaaacagaatggttttaccaaattttaaagaaaatctagaaaaatatgcgaaattgttggttgcgaacggaattaacgtgcaacctggtcacactttggctctctctattgatgtggagcaacgtgaattggcacatctaatcgtgaaagaagcttatgccttgggtgcgcatgaggtcatcgttcagtggacagatgatgtgattaaccgtgagaaattcctccatgccccgatggagcgtttggacaatgtgccagaatacaagattgctgagatgaactatctcttggagaataaggctagccgtcttggagttcgttcatctgatccaggtgccttgaacggagtggacgctgacaagctttcagcttctgctaaagctatgggacttgccatgaagcctatgcgtatcgcaactcaatctaacaaggttagctggactgtagcagctgcagcaggacttgagtgggctaagaaagtcttcccaaatgctgcgagcgacgaagaagcagttgatttcctttgggaccaaattttcaaaacttgccgtgtctacgaagcagatcctgttaaggcttgggaggaacatgcagccattctcaagagcaaggccgatatgcttaataaggagcaattttcagcccttcactacacagcgccaggaacagatttaacacttggtttgccaaagaaccacgtttgggaatcagctggtgctgtcaatgcacagggcgaagaattcttgccaaatatgccaacagaagaggtcttcacagcgcctgacttccgtcgtgcagatggttatgtcacttctacaaaaccgcttagctacaacggaaatatcattgaaggcattaaggtgacctttaaggatggacaaatcgtagatatcactgctgagaagggtgatcaggttatgaaagaccttgtctttgaaaatgcgggtgcgcgtgccttgggtgaatgtgccttggtaccagatccaagtccaatttctcagtcaggcattaccttctttaacacccttttcgatgaaaatgcgtcaaaccacttggctatcggtgcagcctatgcgactagcgttgttgatggagcggagatgagcgaagaggagcttgaagctgcagggcttaaccgttcagatgttcacgtagactttatgattggttctaaccaaatggatatcgatggtattcgtgaggatggaacgcgggtacctcttttccgtaatgggaattgggcaaattaaggagataatatgttaggaagtatgttcgttggtctcctagtgggatttttagcaggtgctatgaccaatcgtggagagcgaatgggatgttttggaaaaatgtttctcggttggatcggagcctttctaggtcacttgctctttggaacttgggggccagttttatcaggaacagctattatcccagcgattttaggagccatgattgttttagctattttttggagacgaggaagttaatttcctaaatctgatactcaatgaaaatcaaagagcaaactaggaaactagccgcaggatgctcaaagcactgctttgaggttgcagatagaactgacgaagtcagctcaaaacactgttttgaggttgcagatagaactgacgaagtcagtaacatatatacggcaaggcgacgttgacgcggtttgaagagatttttgaagagtatgaaacgaaaaggaggttggtcattgtactagcctccttttgatatgatataatagttctatgagattagataaatttttagttgcctgtgcggtgggaagtcggactgaggtcaaaaacttgctcaaggctgggcgcgtgactgtaaatggtaaaaaagaaaaatcagctaaattgcagattgatgaaaaaatagatgagattcgctttgatgggcaagtgttggagtatgaagagtttgtctactacatgatgaacaagcccaaaggagttatctcagcgactgaggatcccaagcacagaaccgttctggacttgttggatgacttggcgcggagtaaggaagttttcccagtaggacgcttggatattgacacgcatggtcttttgctcttgaccaatgatggtcagctggctcatgttcttctttcgcccaagcgtcatgtggacaagacttatctggcacaagtcaagggaatcatgacccaagaagatgtggagacatttgctgagggtattcctctcaaagactttacctgtcaacccgctatactggagcttgtatccatagatacagaaaagaatcaaagccaaatccgtgtgaccattgcagaagggaagtttcatcagatcaagcgtatggtgggctactgtggcaaggaagtggtggacttgcaacgattgactatgggaactttagtattagatgagaacctagaacgaggggaatggcgtcgcttgaccaaggaagaattagaaattctccgcgctaatattatttaatttagtttaatactcaatgaaaatcaaagagcaaactaggaaactagccgcaggctgtacttgagtacggcaaggcgacgttgacgtggtttgaatttgattttcgaagagtataaattcgaaaaaggtgagggacaatgtcctcgccttttatgttttttagttgcttcctttgtgaaaagagttataatagactgtagaataaaaggaggaatctatgaacgcgattcaagaatcatttactgataaactatttgccaactatgaagcaaatgtaaaataccaagcgattgaaaatgctgccagccacaacggaatttttgcagctctggaacgtcgccaaagccatgtagacaacacacctgttttctcattggatttaaccaaggacaaggtcactaaccagaaagcgtctggtcgttgctggatgtttgcggctctcaacaccttccgccacaaactcatctcgcaatacaaattggagaactttgagttgtcacaagcccacactttcttctgggataagtatgagaaatcaaactggttcttggagcaagtcattgcgacttcagaccaagaattgactagccgcaagttagcttcttactccaaacacctcaacaagatggcggtcaatgggatatggtcgtttccctctttgaaaaatacggtgtcgtgcctaagtcagtttatcctgagtctgtttcatctagcagcagtcgtgagctaaatgcgatccttaataaattgcttcgtcaagatgctcaaatcttgcgtgacttgcttgtttctggtgcagatcaagcgactgttcaagctaagaaagaagacctcttgcaagaaatctttaactttcttgctatgtcattaggacttccaccacgcaagtttgactttgcttatcgcgataaagataacaactacaaaagtgaaaaaggaatcacaccacaagagttttacaagaaatatgtcaatcttcctttagaagactacgtttctgttatcaatgctccaactgctgataaaccttacggaaaatcttacacagttgagatgttggggaatgtggttggtagccgtgcagttcgctacatcaacgttccaatggagcgcttgaaagaattggcgattgcccaaatgcaagcaggtgagactgtttggtttggttctgatgtcggccagctcagcaaccgtaaggctggcatccttgcgacagatgtttatgactttgaatcaagcatggacattaaacttactcaagacaaggctggacgtttggactatagtgaaagcttgatgacccacgccatggtcttgacaggtgttgacttggacgaaaatggtaaatcaaccaagtggaaggttgaaaactcatggggagacaaggtcggtacagatggttactttgttgcctcagacgcttggatggacgaatacacataccaaatcgttgttcgtaaggaattgctgacagcagaagaacaagctgcctatggagcagaaccaatcgtacttgcaccatgggatccaatgggagccttggctgaataaaagcatagaaaaaaggaatcagattttagaacctggttcctttttagttgcttgattacatgatgtgaagaacatgtgccacaatacccactgcgaagagggcaaggataatagtgattggagatacttttttcttaagtaagtacatgcaaagtaaagtaaggagtagtcctgataatccaggaatcaacatatccaagttttgttggaaagtagtaactttttcaggagtttgagacaatccttgtcctacttgtgcgaatgcttcttggatacctttagacccttctggcaatttatcccaatggatataagccttttcatctagttgaactttagaaacatcgaaagcaaatttaatatttacccagcgttgaacaaggacagcaagaatgaacatcccaaggatagaagctcctttagtgatatcttgaaggataccaccagacatatctttagtgatttctgatccagccttgtatccaatctcttgaacataccacaagaatgacatacgaatcaagttccatgcaacaaagaagaggagtggccccaagatattgccagtaagggcaagtgaagcaccgagagatccaaggattgggcgtactgtaaaccagaatactgggtcaccgataccagcaagaggtcccatcataccgattttaaccccttggatagcagcgtcatcgatttccacaccgttagcacgttcttcttcaagcgcaagagtaacccccatgactggagcagctacgtatggatgagtgttgaagaactcaaggtgacgctcaagagcagcgatttgatcttcttttttagtatagagttttttgatagctggaatgagtgtataagcccagcccaagttttgcatccgttcaaagttccaagacccttgtaagaaggttgaacgccaccaaacttttttacgatctgatttagttaattgaagtttttcagtcatgatgttttcagtcctttcttatcttagtagtcttctaggatatcgccgattgggtcgttagaagttgcggctcctccgccaccatttccaccagttttagaaaggtgaaggtagataagagcgatagcaacgccgatagcaccgaatccgattagagtaatatctgacacagcagcgagaacgaaaccaagagcgaagaatggccatacttcacgagttgccatcatgttgataaccatggcgtaaccaacggcaacgaccataccaccaccgatagccataccatctttgagccagtctggcatggcactaaggatactttgtacagtttcagttggtaccataaggagaagagctgcaggaagcgcgatacgaagtccttggaaaagtagcgcgatgaaatgcgcacgctccacagcgccgaagtcaccttttttagcggcagcatctgcagtatgaaccaaaccaactgaaattgtacgaacaatcattgtcaagaaaagtccagctacagcaagagggatagcaaccgcttgggcaacaccgataccagtcttggtaaagtcaccaccaagaaccatgataatggcagcagcgacagaagcaagtgcagcatcaggagcgatagcagcaccgatatttgaccaaccaagggcaatcatttgaagcgatccaccgaggataatccctgcttccaagtgacctgttacaagcccaataagggtacaggctacaagtggttggtgaaattggaactggtcgaggatgccttcaagacctgcaaagaaggctacaacgactactaaaaccatagaaataatagacatgtttaaaatcctttcataaataatggcttatttgacattggctttgttaatcaagtcaaacaaatcttttttagaatcatttggtactttacggacatcaaattcaacacccaagtcacgcattttttcaaatgtagcaacgtcttctttgtccatagacaaaacggtattgaccaatgttttacctgttgagtgagccatagaaccaacattaagagtcttgattggcacgccgccttcgatggcacgaagggcatcttgaggtgtttcaaacaagataagggcatgtgtttctccaaaacgtgggtcttttgaaatctcaatcagtttttgaattggaaccacgttagccttgacattacctggagctgcttgtttaatcaattctttacgaaggtcgtctttagccacgttatctgaagcaacgatgatacgatttgcttttgaatctggagtccaagcagttgcaacctgaccgtgaagtagacgtgtgtcaagacgggcaagattgattttcaatttaccgtctccgataacagttccttctgggatagcagtttgggcaactggagcagctgcagcgcttgcaacttcttcgactggatttagctcttctggaagagctttgatgccatctttggcttctttaatgatattagcagcgactttttctacacctgcagcagcgtccatgaggcgctctgtgtaggcttgaatcaacatcggtaagttaagtcctgtgatgatggcaaacttacgctcaggattttctcccatcacgcgactagcttggttaaatggagaaccactccaaaggtcagccaaaactagaacctcatcttctgcgtcaaatgcagcaacagcgttattaaacttagcgtatagatcatcaggaccttcatttggcataaaggtcacaacttgaaccttttcttgttcaccaaagatcatagatcctgactgatgaatacccgcagcaaattcgccgtggctcgcaataatgattccgatactcattattgtcattcctccttttttgttttagttttcatttaagaaaactttaagactgtttaagtataaaccgttttcataaaaaaagcaactatttatcataaaaaattaaaaaatttttatttttgtatgttgatatgttgagtttttgaggagtaatcttgaattcttatttaaaatttaatataaaaaagttggaagaagcttccaacttttaaaataggtttctattagattagtgggtgaagtcgagtaccatacgtccttggatttggcctttttccatttcgtcgaaaatggcaacagcatcttctactggacgtttttgaacaactgggactaccagaccttctgcaccaaattggaaggcttcttctaagtctttacgagttccgacaagagaaccgatgacttggattccatcgaggactgttttaacgatgctgagttccatcatttcagaaggaagaccaacagcgacgacgcgaccaccagcacgaatggagtcaacagcctggttgaaggcaactttagacacagcagttacgacagctgaatgagctcctccatcagttttttctttaatgagtccagctacatcttcaacttcgaggccgttaatcacaatgtcagcgcctacttcttttgcaagggcaagtttgtcattgttgatatcgactgcgataacatgagcattgaatacttttttagcgtattgaacagcgaggttaccaagtccaccagcaccgtaaagaacaacccattggcctggttcaacttttgcttctttgatagctttataggttgttactccagcacatgtgatagaagaagcttgggctggatcaagtccgtcaggaactttgacagcatagtcagcagttacgatacattgttcagccataccaccgtctactgagtagccagcatttttcactgtacggcaaagggtttcgcgaccagttgtacagtattcgcaagtgccacatccttcaaagaaccaagcaacgctgacgcggtcaccgactttaaggcttttcacatctggagcaatctctttaacgataccgataccttcgtgcccaagaacacgtcctgggacttgaccaaagtcaccatgagcaacgtggaggtcggtgtggcaaacgccacagtattcaacttctacaagtgcttccccagtttcaagtggacggagtactttttcttcaatagcaacaccagtgctttctggatttacaacaacagctttcatagctatcctccttgatattgaccgagaacagggacaacgggactggattgattttttgtcaacagagtcgagtgtgacgagctctcttgtatttatatgtgaagtatatcacaaaagaaagccttttccaaggttttggagacaaaaagtagaacaatcgattaactggttgatgagactgtgaaaagagcacaaagaccagcttgcaagctggtcatactcttcgaaaatctcttcaaaccacgtcagcttcatctacaacctcaaagcagtgctttgagcaacctacggctagcttcctaagtttgctctttgattctcattgagtatcagtataggttataagaataagtcttgtagggttttggcaaccccatcttggtcgttggtaagggaaatttgctcatctgcataagggagtagctctggattggcatttttcatggcataacccttcccagcaaaagcgagcatttcggtatcattgtgttcatctccaaaggcaatcaaatcttttttgtcacgattcattatcttgagcaagtagtccaaagcaaaggccttgttgacaccttttggggtacattcaaggatattgagcggacctccccaggtattgatagaaagttgatgctggtagaaggcgttcatttcttttgccaaggaatatttgtcactggctctagtctgcaagaggatacagttagggtccttggtcaccaattcaggctggaattgatcttcaggctggaaagcttctacaccaaatagtttgggattggcaatttcttcattgggatttgtaatgtagaattttttacgatattctccagcgataaaatcggcttgaatgtcctctgaacgttgaaccatatctagcagatattttttgtctacagtcaaacacttttcaaaatcccaaacttggtctggtaaatgagtaagggatccgttgaagttaatcataggagtgtctaagcccagttcacggtaaaaatcttttgacatacggtaagggcgacctgtcgtaataataacctgatggcctttttcagcaacttttttgatggttcttttggtaaagtcagaaatttgactgtctgagttgagcagggttccatccaggtcaactgcaataatttttttcgtcatatggacctttctagtgtgttttcagataagatgtcttctattataacagaaagcaggcagaaaagcagattccaaacaaaaaatgaaattggattaatttcttaaacaaatcaaacaaagacattgaaaaagtgaatgataaatgatataattctattattgttcgtaaaaattaaaaggagattgatgatggacaaattatttaaactaaaagagaacggtacagacgttcgtacagaggttctcgctggtttaacaactttctttgcaatgagctatattctctttgtaaacccacaaatactttcacaaacaggaatgcctgctcagggcgtcttcctagcgacgattattggtgcagtagcgggtaccttgatgatggctttttatgctaacttaccttatgcccaagcgccaggtatgggactcaatgccttctttacctttacagttgtattcgggcttggttattcttggcaagaagccctagctatggtcttcatctgtgggattatttcattgattattaccttgacaaatgttcgtaaaatgatcattgaatcgattcccaatgctcttcgctcagctatttcagctggtatcggtgtcttccttgcctatgtagggattaagaatgctggacttttgaaattcacgattgatccaggcaactatactgttgtaggagaaggggctgacaaagctcaagcaacgattgcagcaaactcttcagcagttccaggattggtcagctttaataatccagctgttttagtggctcttgcaggacttgccattactatcttctttgtcatcaaagggattaaagggggaattattctctctatcttgacaacaactgttcttgctattgcagttggtttggttgatttgtctagtatcgattttgctaataaccatgttggtgcagcttttgaagatttgaagacaatctttggtgcagctcttggttcagaaggattgggagctttggtttcagatacagctcgcttgcctgaaactctgatggccattcttgccttctcattgacagatatttttgacacaattggtaccttgatcggtacaggtgaaaaagttggtatcgtagcgacaaatggtgaaaatcaccaatcagccaaattggataaggctctttactctgatttgattggaacgacagtcggtgccattgcaggtacttcaaacgtaacgacttatgttgagtctgctgctggtatcggtgcaggtggacgtactggtttgacagccttggttgtagctatctgttttgcgatttcaagcttctttagcccacttctagcgatcgtaccaacagcggctacagctccaatcttgattatcgttgggattatgatgcttggtagcttgaaaaatatccattgggatgatatgtctgaagcagttcctgccttcttcacatctatctttatgggattcagctactctatcactcaagggattgcagttggtttcttgacttacactttgactaagcttgttaaaggtcaagttaaagatgttcatgtcatgatttggattttggatgccttgtttatccttaactacatcagcatggccttataatagaatgacccagggggatttccccccttttttaatacaaaggagataggtgatgaaagagaaaaatatgtggaaagaattgttgaatcgtgcaggctggattttggtctttttacttgccgtccttttatatcaggttcccctagtggttacctctattttgactttaaaagaagtagccctgctacagtcagggctgatagttgctggcctttcaattgtggttctggctctatttattatgggagctcgtaaaaccaagttagctagttttaatttttctttttttagagctaaagatttggcacgtttgggcttgagttatctagttattgtcgggtcaaatatacttggttccattttattgcaactgtcaaatgagacgacaacagctaaccagtctcagattaatgatatggttcaaaatagttcgttgatttccagtttcttcttgctagccttgcttgctccgatttgtgaggaaatcttgtgtcgtgggattgttcctaaaaagattttccgaggcaaggagaacttgggatttgtagtcggtacgattgtgtttgctttattgcatcaaccaagtaatttaccttctttattgatttatggaggtatgtcgacagttctatcttggacagcctacaagacccaacgtttggaaatgtcgatcttgcttcacatgattgttaatgggattgctttctgtttgttggctcttgtggtgattatgagtcggacattaggaatttctgtttaaaagtttttatgtaggaaccgacctctttctaccagggaaagatgaatgcaatcgtgtccatctttttctttttatggtaaaatagaaaaataatatgatgaaaatccttgagggagtgaccgatatgtcaagtaaagccaatcatgcaaagacagttatttgcggaattatcaatgtaaccccagactccttttcggacggtggtcaattttttgctcttgagcaggcgctccagcaggctcgtaaattgatagcagaaggagccagtatgctagatatcggcggagaatcgactcggccgggaagtagctatgttgagatagaagaggaaatccagcgtgttgttccagtgatcaaagcgattcgcaaggaaagtgatgtcctcatctctattgatacttggaagagtcaagtagcagaggctgctttggctgctggtgccgatctagtcaatgatatcactggtcttatgggtgatgagaaaatggcttatgtggtagctgaagcgagagcgaaagtggtcatcatgtttaacccagttatggctcgacctcagcatcctagttcgcttatcttccctcattttggttttggtcaaacctttacagaaaaagagttagctgactttgaaacattgccaatcgaagacttgatggtggctttctttgaacgagcactagcgagagcggcagaagctggtattgcaccagaaaatatcctgttggatccaggaattggctttggtctgaccaagaaagaaaatctgcttcttttacgggacctggataaactacatcagaagggctatccaatctttctcggagtgtcgcgcaagcgatttgtcatcaatatcctagaggagaatggttttgaagtcaatcctgagacagagcttggtttccgaaatcgggacacggcttcggctcatgtaactagtatcgctgcgagacagggtgtagaagtggtgcgcgtgcatgacgtagctagtcacaggatggcagttgaaattgcctctgccattcgtctggctgatgaagcggaaaatttagatttaaaacaatataaataagatgaaagaaattgaaaacaatcagtggattgctaactaccggacggatcaaccgcattttggcttggaacgaatggtggaactgttagctttgcgtggcaatccccatctcaaactcaaggtcctccatatcggagggactaacggcaagggctcgactattgcttttttgaaaaagatgctagaaaagctagggttgagagttggcgtgtttagctcgccctatctcattcattacacagaccagattagcatcaatggggaatcgatctcagaagcgaggctagaagctctcatggcagactatcagtctttgctggagggagaagcggtcgccaatttacagggcacaaccgagtttgagattatcacagccctggcctatgactactttgcctcagagcaagtagatgtggccatcatggaagttggcatgggtggacttttggatagtaccaatgtctgtcagcccattttgacaggaattacaactattggcttggatcatgtggctctacttggtgacaccttggaggtcatagcagagcagaaggcaggtattatcaaacaagggatgcccttggtaacagggcgtattgctccagaagccttggctgtgattgaccgcattgcggaagggaaagatgcgccgagacttgcctacgggacagattatcaggttcgtcatcaagaaagtgtggtgacaggggaagtctttgactatacaagtgctgtcagacaaggtcgcttccagactagcctgcttggtttgtaccaaatagagaatgctgggatggccatagctttacttgatactttttgtcaagaagatggtcgagagctagcaagcaatgattttcttggtcaagccttggaagaaacaagttggccagggcgtttggaaatcgtgtcaagagatcccttgatgattttggatggagcccacaatccccatgctatcaaggccttgttggtaaccttgcaagaacgttttgcggattatcataaggaaatcctcttcacttgtatcaaaaccaaggccttggaggatatgttggacttgctgggagccatgccagttaccgagcttactctaacacattttgcggatagtcgggcgacggatgaaaacgtgctgaaagaggcagctaagtctagaaatctcagctaccaagattggcatgattttctagagcagaatttgacagataaaaaagaagagaaacaaacagttaggattgtcacaggttccttgtatttcttgagccaagtgagggcctatctgatggagaggaagaacgagaatggatacacaaaagattgaagcggctgtaaaaatgattatcgaggctgtaggagaggacgctaatcgcgagggcttgcaggaaacacctgctcgtgtagcccgtatgtatcaagagattttttcaggtcttggtcaaacagcagaggaacatttgtcaaaatcctttgaaattattgacgataatatggtggtagaaaaggatatctttttccataccatgtgtgaacaccacttcttgccattttatggtagagcgcacattgcctacattccagatggtcgtgtggcaggcttgtctaagctagcccgtacggttgaagtttattcgaaaaaaccacaaattcaagaacgtttgaatatcgaagtggccgatgccttgatggactatctaggtgctaaaggagcctttgttgtcattgaggcggaacatatgtgtatgagtatgcgtggtgttagaaaaccaggcactgcaaccttgacgacagtagctcgtggtctatttgaaacagataaggatctccgtgaccaagcttatcgtttaatggggctataaaaagaatccgcttcaagcggatttttctagaaaggaatcattatggatcaactgcagattaaggatttggaaatgtttgcctatcatggtctttttcctagtgagaaagaattggggcagaaatttgtcgtttcagccatcctatcctatgatatgaccaaggcagctacagacttggatttaacagcctctgtccattacggagaattgtgtcagcagtggacgacttggtttcaggaaacgagtgaagatttgattgaaacggtagcctataaactggtggaacgtacctttgagttttatcctcttgtccaagaaatgaagttggaactgaaaaaaccttgggcaccggtgcatttgtcactagatacttgctcggtaaccattcatcgccgcaagcaacgagcctttatcgccctaggaagcaatatgggagataaacaagcaaacttgaagcaagccattgacaaactgcgagctcgtggcatccatattctcaaagagtccagtgtcttagcgacggagccttggggtggagtggagcaggatagctttgccaatcaagtggttgaggtggaaacctggctaccagcacaagacttgttagaaaccttgttagccattgagtcagagctgggacgggtgagagaagtgcattggggacctcgtttgattgatttggacttgctctttgtggaggaccagatcctttatacagacgacctcatattgcctcatccttacatagcggaacgcctttttgtccttgagtccttacaggaaattgcgcctcattttatccatccgatattaaaacaaccgatccgcaacttgtatgatgctttgaaaaaatagaaaaactctagttttcagttacttgcaactgaaggctagagtttttatactcttcgaaaatctcttcaaaccacgtcagcgtcgccttaccgtactcaagtacagcttgcggctagcttcctagtttgctctttgattttcattgagtattaaaataggtcattttcttctgggaggaggatagtttctctaccgtccatgtctaaaaccagtactcttgggggataacgagggtcgaaaggatggttaaagtcaaaatcaatggctgtagggaggtgttgacttgaaaagtggaaggtaatctttccttggttattaagcaattgaaactcgagttcttcttccaattcaaagacattttttaagaaatggtcgatgatataccaaaaagagtcaatgatgtcatcaggcaagctggtaacaataccaaaactagcagatcgcatgtgggtattggtaaaagccatatctctgtcccctttcttttcccttatcatacagcaaataggattaaaaatcaagaaaaggtgattttttgaaaaggattttagttacagggagaaatagggaaaaaattcctaaaaatctaccgaagttaataggtaaattcccaaattaacttgattatataactttcagttactttgagaagttaccgaaaaatatttttcatatctattgacttttaggggtaaaatttggtatgatagtaggcggtattgtttaccccatttgaaaggccccggaaccttccaaatacttttcgatgggaaggaacacccatcaccgtaaacaaaaatcgaactatatataggagaaatcatgaacaaaacaacatttatggctaaaccaggccaagttgaacgtaaatggtacgtagttgacgcaactgatgtaccacttggacgtctttctgcagtagttgctagcgtacttcgcggaaaaaacaaaccaacatttacaccacacactgatacaggtgacttcgtgattgttatcaatgctgaaaaagttaaattgactggtaaaaaagcaactgataaaatctactacactcactcaaaccacccaggtggattgaaacaaatctctgcaggtgaacttcgttctaaaaatgcagtacgtttgattgagaaatcagttaaaggtatgcttccacacaatacacttggacgcgctcaaggtatgaagttgaaagtatttgttggagctgagcacactcacgctgcacaacaaccagaagttcttgacatttcaggacttatctaaggaaaggaacaataaagtatgtcacaagcacaatatgcaggtactggacgtcgtaaaaacgctgttgcacgcgttcgccttgttccaggaactggtaaaatcactgttaacaaaaaagatgttgaagagtacatcccacacgctgaccttcgtcttgtcatcaaccaaccattcgcagttacttcaactgtaggttcatacgacgttttcgttaacgttataggtggtggatacgctggtcaatcaggagctatccgtcacggtatcgctcgtgcccttcttcaagtagacccagacttccgcgattcattgaaacgcgcaggacttcttacacgtgactcacgtaaagttgaacgtaagaaaccaggtcttaagaaagctcgtaaagcatcacaatttagtaaacgttaattcgaaagaattactatacttatacagagcacctttcggggtgttctttttttatactttcttactaaattggtgcaattgacacagttgttgcgactttagtcgcttacaaatgtggctgcaacctgacatggtcagttgcctcaaaacgttaatcaatacgattatatcaacgtttcaaagcactcaagggtttaccctatgggtgcttttttctatactttctaaaaaagtttaccctaaaatttgccctaaaattaccctacttatttttaagatgttggtaggcaacttgtccagcagataatggaactatgtttgaagtattaacataagtcttagttgtaacggtatcgctatgagttaatgcttcagaaatggcttctaagctcattcctgcttttttagcaagtgtcgctcctgtatgtcgtaatttatgcggtgtagcgtgtgtcagttctttatgtcggctttctaatgcttttcattttattgttcagatagtcggcatgtaaaggcttgttgatgtttccttttgtgtcgatatatgtaaaaacaaattgttctggattactgaggatgccaaactttgctagttcatatctttgttgtttttcccaagaggtaagaagttgaagtaaatcattagaaatagagaaaaataggatagcaaaagctctatttcaggagaaaatgaagcaaatatttccataataaaacgcatattatcaaggttgttcaatacctgatactatgcgcttttctgattttaaagactgattgctcagtctctttttcattataattcagttacaatttaatcttatttgagaaagtgggtgatgctattctctaataagactatgatattaatttttgatagtacttccagaaattatagatcccctttcatccccaatttctattttcaagtgtccgtattatatagcgtattcgaaattcactatatcttgttaggatttgggtagaatcattgataacagactgttgcaaatctaattagctgtatgatttatatttatctatttttctagtaaccaatctataatgcttttcttctcgattccattgtaattggctgttggctgaatcgtatccattgttaatagatatttagggaattgatctttaatggcttctagtggtctaagttctctttctagtgtttctggagcaagtgttgtttcactgacctgataataagcgtagtggccaagatcagttacaacaacaaaatcaacctcatacttatctaaattaccaacatatacttgtgaatatctacgtctcaattccaaatataccatattttccaagatatgcctaatgtcttctttctggtctggtaataagagatgtcgtaaacctaaatcaacgggataatatttttctaaacgttgcaataatgctctaccttttacatcaaaacgtggaacggaataaaaaagtaaactatctgtcaaagttgtcaaataattttccaaagtattatgggatattgaaacattttggctgactagggtattgcgaatcttatttgttgatattaagctacctgtactactgagaagggttcggacaatgcgctcaataatagtaggatttggttttcccaatctagtgacaatatcatttaacagtatggagttatatattcctctgagatagtcaattttttcatcgtaagatgatgtttgcaataagtaagggaaagcactaaagagataattgttaaaaatttctgttgtattcagattctctgtgagagattgacctgatagatattcttcaaatgacaaaggaagaacctctatctcaacataccgaccagtcaagtttgttgctaattggctactcataaagtaggcgttagatccagtcaaatagaggtctacatttgctaagatgaatagactatctgctaccagttcaaatttttcaacatattgaatttcatctaaaaagatatagtatgttttcttgctaactaattgatcttttatataagcgaataatgtttgaaaatgtcgcagatcatagtaactcaaatcttcgaaattgatgaatataatctgatcctcgtctaccccagttgctagtaactcctctttatagagttgaaaaagcacagatttaccagctcgtctaactccactcacaactttgatgattggtcggtcacgatgttttcttaaaaaatctaaataatgtggtcttttgatatagttcataatagttacctcaaagatagtataatacaaatagatgttattttcaaatatttagaaataatatttaatttgttttattatttctaagtgtttagaaatatagtaaaatgaaccaaaaatagtacacaatgtggtataatcttcttatggcatattcaatagattttcgtaaaaaagttctctcttattgtgagcgaacaggtagtataacagaagcatcacacgttttccaaatctcacgtaataccatttatggctggttaaagctaaaagagaaaacaggagagctaaaccaccaagtaaaaggaacaaaaccaagaaaagttgatagagatagacttaaaaactatcttactgacaatccagatgcttatttgactgaaatagcttctgaatttggctgtcatccaactaccatccactatgcgctcaaagctatgggctacactcgaaaaaaagaaccacacctactatgaacaagacccagaaaaagtagccttatttcttaagaattttaatagtttaaagcacctaacacctgtttagattgacgaaacaggattcgatacttatttttatcgagaatatggtcgctcattaaaaggtcagttaataagaggcaaagtatctggaagaagatatcagaggatttctttggttgcaggtctaacaaatggtgagttaatcgctccaatgacttacgaagagacgatgacgagcgacttttttgaagcttggtttcagaagtttctcttaccaacattaaccacaccatcggttattattatggataatgcaagattccatagaatggggaagctagaactcttgtgtgaagagtttgggtataaacttttacctcttcctccctactcacctgagtacaatcctattgagaaaacatgggctcatatcaaaaagcacctcaaaaaggtattaccaagttgcaataccttttatgaggctcttttgtcctgctcttgtttcaattgactataaatcgctataagaaaaaatcattttattggtataaagaagtgattgaaagtaatggcgaaacgttagataattagttcataaaaaacaagtttagatcctcatctaaacttgtttttttaaaattgaaggatgattttggaggatataagatgacattgactattcatgtatattataaaggtgatggagatagtgcaataaagtttgcaagagaaatgcttgatagtggccttgttaaagaaattagaaatcaaaaaggtaacttgaaatacgaatattttttaccaattgaaaaagagggaactattctccttattgatcagtggataaatcaagaaactttagataaacattatcaatcaaagacaatgcagaaaatcttagatttaagaaaaaaatatcacttgcagatgcaagttgaacgttatatagaagatgattctgggatgccagaaagcgataagtcgtttatagacacagggaattagaattattgtgagagtttttgtagtttgaaagtattgaaaatcgtaaagatatcattacgagaatacaagaagatattgttctatttccattaaaaattacttctttccttaacaataaggaaaaagaatgcgttttcatcttttggtttaaggtttataataagagtatcaaagtcaggaggaaaaaagatgactacttttaaagatggatttttatggggtggtgctgttgctgctcatcaacttgaaggtggatggcaagaaggtggcaagggaattagtgttgctgatgttatgactgctggtcgtcatggagtagctcgtgaaattactttgggagttttagagggtaaatattatccaaatcatgaggcgatagatttttatcaccgttataaagaagatatagcactttttgctgaaatgggattcaagtgcttccgtacctctattgcatggacacgtatctttccaaaaggtgatgagttagagccgaatgaagaaggattacagttttatgataatctttttgatgaatgcttaaagaatggtattgaacctgtcatcactctatctcattttgaaatgccttatcacttagtgaccgaatatggtggttggaaaaataggaaattgattgatttctttgctcgttttgcagaagtcgtatttaaacgttacaaagataaggttaaatattggatgactttcaatgaaatcaataatcaagcgaattatcaggaagattttgcaccatttactaactcaggtattgtatatgaggaaggtgataatagagaagcaattatgtatcaagcagcacattacgaattagttgcttctgcacgagctgtaaaaattggtcatgagattaatccagattttcaaataggttgtatgattgcgatgtgtccaatttatccagttacttgcaatcctaaggatatcttaatggcaatgaaagctatgcagaagcgttattattttgctgatgtgcatgttttaggtaaatatcctgagcatattttcaagtattgggaacgaaaaggtatttcagttgattttactgcccaggataaagaagatttacttggtgggactgtagattacattggtttcagttactatatgtcctttgctatcgactctcatcgtgaaaataatccttattttgattatcttgaaacagaagatttagtgaaaaataattatgttaaggcttctgaatgggagtggcaaattgatccagaaggtttgcgttatgcgttaaattggtttacagaccactatcacttaccactctttattgttgaaaatggttttggagctatagatcaagttgcagcagatggtatggtacatgatgattatagaattgaatatctaggtgcccatattcgtgaaatgaaaaaggctgtagttgaagatggtgttgatttaatgggttatactccatggggatgtattgatttggtttcagctggtaccggtgaaatgcggaaacgttatggctttatttatgtagataaagatgataatgggaagggaagttataatcgttccccgaaaaaatcttttggctggtataaggaagttatttcatctaacggtgaatcagtagaatagtataaacaaactgagattattctcagtttgtttagcatattgaggtgacatatgattggaagtattgcagcaattttaacaacatttgcatttttaccacaagtttttcgtgtagttaagacaaaggacacaggatctattgctctaggtatgtatgttatgcaagttattggtattgcattgtggcttgctcatggtattcgtataggagacttgcctttgattttagcaaatagtgtttcatttctactctcaggaataattttattttataaattgaagtataaataatttttttccatatcatttaggaaaatgagggaattgtcattggaaacgctttattttataataaaaatagataacaaataagccaacttagcacagctttgattggatttaagaaaaggagaaaatattatggcaaaagctttaattatttgtgcagcaggaatgtcttcatcacttatggcacagaaaacaacagagtttctaaaaggaaaagggaaagatattgtagttgatgctattagtgctactgaaggagggaaagctatcgcagcagcagcttttgatttgtatcttgtcagtcctcaaacaaaaatgtactttaagcaatttgaagaggctggttctaaagcaggaaaaccagttgtacaaatacctcctcaagcctatattcctattccaatgggaattgaaaaaatggctaatttgattcttgagaatatttgatgaacacatgaaatgtcaataaatatttaggttaagataaattgttttgagtttgatataaactgatttaagtgtataatatgcttcaatatatgaaaacatacgttttaggagggaatgaatgtgttaaacattaaagagaaagatatccttcaatttttaataaaaaataaggaacgttttgttacaagcaaagaactggcagaatatttatcctgttcagatagaactgtccgtaatgtactgaaattaattgagaagacaatgattattcaaggagtccggttgatttcaaaacaaggtcaagggtatcaaatattttttgagaatcaaggcgcttaccaggagtttagacaaacttatgaactggaagaagactatacgaaaactgcggtttcaaaaggtgatgatcgtttagtatttatcttaaataaattattatttgagcaagttccagttctttttgatgatttagctgatgaactttacgttagtcgttcaacattatctcatgatttcagaaagatacgagtgatgttatcagagtataatttgtccattgagagtagggcgaataaaggagtttatgtctcaggcgaggaacgtgataaacgacgttttatcataaattatttcctagagaatcaattttttaaaacaatacattgctatgtaaaatttaacttttttgatcaaactgttccattagaagaatttgctagaattgttttggatgaatgccaagaggccaacctaaaactatctgattttgtactacagaatttagtagttcacatagcattgtctgtgattcgtttaaaatccggatttgaaataaaaaatatagactgtcagatgactgatgatgcaatagagagaaaggttgcccaaagaattctttctaaagtaagagaagtaacaaatcaggaatttccagttcaggaaatagactacattactttgcatttgttagctaagagtcaacaatgtcaaaaaaatcagaagaatatttctgaagaagttttaaaaaaatctttatttaaaacatttcagaatttaggattagatgatatgtataacttttcttcagatttccaactaattgaaggattgataactcatctaatgacactacaagtacgtttagaaagccggattaccttaaataaccctttggtagatgaaattaaacagaattatagtgatatattctttatgactagagaaattcttgcaaatatggacaagttcttggagtggacaatatcagatgatgaagtagcatatgtaagtcttcactttttagctgctatggaacgtagcaaagagagtactaagtttaatattcttgctatttgtgcaacaggatttggtgcagcccaaatgttaagaaatcgtttggaaacggagtttgggaagcgagtagaagttgttgatgtaataggctactatgaattgaatcaagaaaaacttaaaggaatagattttatagtgtcagctattgatttatcaaatctatattttcaaatcccagtttttaaagttagtgtgtttcttaagagtgatgagatggaaatgattagaaaagctatggattagatgcaagtttctagttatgtacaatcatcaaagattaacaaatttgaaaacaacggctttagacagtattttagtaaagaaaactttttaatatgtactgaatcagacaaggtaaatttacttgaaaagatggttgagagtttatctgttggtgaatcaaatgagtttgaacaatctttactttatggaattaaacagcgcgaagaattaagttcagttgttttttctgaaaaaattgcagttccgcatcctattcagccctttggtacagagggaaaggtttcggttgcaatttgtaaagattcgttactctgggataatcaaagttcacatgtccagctagtatttcttctatctccatcaatatatgggaacgaaggtttggcaactgtgactaaaaagatagtctctctgacagagaatgatgaattgcaaaatcagctaatatcttgcaataactttgaagattttattaacatatttgagaagataaaataggaggtttatatgaatcaagaggaactgcaggttgcagcatttgaaattatcctgcattcgggaaatgcaaggtcagaaatacatgaagcatttgcaaaaatgagagaaggtagttttgatgatgcagaaagtaaattaaatcaatcaaatgagataattcttgaagcgcatcatgcacaaaccaaactcttgcaagaatacgcaagtggagtggaaattaaaattgaaattatcatggtacatgctcaagatcatttaatgaccactatgacattattagaagtagcaaaggaaatgttagctctttataagaaagttaactaaatatgtgttgttatataaggaggaaatgatatggataaaaaagaacgacaaaagattgaacaacaacgtcgagagatggctctaactaatacttttttcaatcgatatcttcttctacgttattcaatagcactcttcttttttgggaatatttattggcttttgagtcagtttattagtccctcgcctattattattttccccattatgctcatagtattttctattttagcaactgttgaacaatttaaactttatggaaataggaaagaaaagttgggaataacactaatgtttgttagaatacaaatgcttatttcaataggattacttgttttaacttggacaagttggtttaagaatctttttccgatttttgaaaataaccaagtagcacgtttatttgtttttgtagttcttctattaggtttagttctgagtttgttagacattagaagaattaaaaaaatttataaacgaacagataaggcttatcaacaatttgtccaattggaaaagaactcacttagtttataatcctgatctagtataatttgtatttgaaactagtctttagaaagtaaaaattattatgttttattaaggaggtctatttatggatcaacaaaacgggttgtttggttttcttgaaaaccatgttatgggaccaatgggcaaacttgctcagtttaaagtagtacgtgctatcacggctgcaggtatggctgctgtaccatttactattgtaggatcaatgtttttggtattcagtattttgccacaagctttctcattttggccaattgtggcagatattttctctgcttcatttgataaattcacatcactttacatggttgcaaactatgcgactatgggttctctatctctttatttcgttctatcacttgcatatgaattgacaaaaatttatgcagaggaagaagaactcaatatgaatcctcttaatggtgccttgcttgccttgatggcttttgtcatgacagtaccgcaaatcatttttgatggtggaatgatgaagactgtgacaagtctaaaagaaggtgcagtaattgcagatggatgggcaatgggaaatgtagtcgcacgttttgggacaacagggatttttaccgcaatcattatggcaattgtgactgttcttatttatcgtatgtgtgttaaacataattgggttattaaaatgcctgaagctgttccagaaggagtttctcgtggatttaccgctttggttccgggatttgttgttgcatttgttgttatctttatcaacggtcttcttgtagcaatgggaacagatatttttaaagtcattgcaattccatttggttttgtatccaatctgactaattcgtggattggtttaatgattatttatctattgactcaactactttggattgtaggtatccacggtgcgaacattgtttttgcatttgttagtccaattgctcttgctaacatggctgaaaatgctgctggcgggcacttcgctgttgcaggtgaattttctaatatgtttgtaattgcaggtggttctggtgcaactttaggactatgtttatatattgcttttgcctctaaatctgaacagcttaaagcaataggacgagcatctgtagttccagccttatttaatattaatgaaccattaatttttggattacctattatctataatccagccttggctataccatttattttagcaccaatggttactgctactatttattacgtagcgaattctctaaactttattaagccaattatcgcacaggttccatggccaactccagtagggattggagctttcttagggacagcagatcttcgagctgtattagttgctctagtatgtgcatttgcagcattcctagtctatcttccattcatccgtgtatatgatcaaaaattggtgaaagaagagcaaggtatctaataagtaaaaaagtatactcgatgatagaatccatatagtttaaataatgagtgttaatattagcagtgaagaggtctttttaagatattcttctctgctttttcatattttttcgctatgtagggtatgaagcaaaatagaaagtagttcgaatagttgataaacagggaactgctgttatttaaaaaaacaataaagtaaagtatgttatcgtagaatacgatacaatagtaaaaaagcaaaaagaatgcgttttatatttgggtttgaggcttataaaataggataagcgtgctgaaaacttagatatgacaaacaaaataaaatttttaaaagctacagagaaacatggtataatgtatctaaaggaggtagcatatgtccttagatatagataaagaaaagatgacaatcatgggaatagcttttgaaaaccgatccgtttttaagagtgtttggtatgctttaagtacaaatatgattgaaggatggcgacctacggttagtgatgttgaaaaattacgagatgaagctcttgctctggggatgacttaatgaagcgcaactgttatgaatcttatgactatgttgatccggataatttatataccgatccgggttcttcagttctaagaaataagcaggaaggaaaaaagcacgtgagcttgaatatcgtatgattgctagtaagagtttgaaattatttatcaatcctatcttagttaatagtttaaaagtagtttgtttcacaactgcataagcttagaaaagttgaaaagtgataactctttaataaactcttggtttgttaaaagatattttgtccactgcattttttcaattgactattatttgtcatagatataacagatagaacattgcattcagaataatgaaaaacgcatcaaaaatggtgcgttctgtttttatgctaccataaaaggaggaaaacaaattgaaaatttttaagggagagttttatcgaatctctgtattaacagacaagctagtaaggttagaatactctcaaactggaagttttgaggatagaacgacacaacttatctataatagagattttggccaaatttcgttagattatatcgagacatcaaacgtactagatattatgacggactattttcatctgcactttaataaaggagaatttaacgccgaaaatttatttatagaattaaaaggaaattttgccgtatatggtagtcgctggtattttggtgaatctattgaaacgttaaaaggaacagctcggactctggataaggcagatggagcaatctcgttagaagatggaattattagccgaaatggtatagccttattggatgattctcaaggatttatttgggatgaacaatctggttatattgagagagaaaatcaaattgacctgtatttctttgcctatgggcatgattatagaggagcaatcagagatttttaccatttgactggttcaacacccttgttgccaagatatgctttaggcaattggtggagtagatattggccttatacgtcggatgaatacttggatttaatagacagatttgaaacagagaaaattccattatctatcggtgtgttagatatggattggcatataactgacattccagctcgctttggaagtggctggacaggatatagttggaatagaaacttaataccaaatccagaacagttattgcaacaacttcatgatagaaagctaaaactctccttaaatgtccatcctgctgatgggatacgggcttatgaagaagcttatcctcaaatcgcaaaacggttggggttaaatgtagaactagaagaacctgctatttttgatttttttaatccctcttttagggaagcctactttaaagatgttcattatgaactagaaaagcagggagtagatttttggtggattgactggcaacaagggacacaaggtatgctagatccactttggcttttaaaccattatcactatcaggatagttgtaaaaatgcagaaggtggtttgattttatcaagatatgcaggtcctggtagtcaccgctaccctgttggtttttcaggggatactattattagttggaattccttaagatttcaaccctattttacagcgacagcatctaatatcggttatagttggtggagtcatgatatcggtggacatatgttgggggattatgacgaagagctacaaactagatggctacagtttggtgtttttagtccgattactcgattacatagttctagaagtccttttaatagtaaagaaccttggtttttttcagaaacaacatctaagattatgaagaaataccttcgtttgagacatcagatgattccctatctatataccatgaatgtacagacacatgaggaaggtgccccattaatcagtccaatctattatttctatccagagaatgatgagagctataatgttccaaaccaatacttttttggaacagaactgatggtggctcccattgtagaaaagatggatttgacattccaatctgcaaaagtagatgtatggttccctgaaggtgaatggtatgacttcttttcagagaaaaaatacacaggtggtgtgaagttaagtgtttatagggacatctcgactacgcctgtgtttgcaaaaagtggtgcaatcattcccttggttggttctgagataggtatgggtgttgatttacctgaagttgtagattggtatgtattcccaggaaaacaacattcttttgaaatgcttgaagatcaaaatggtcaaagatataaaacaagattatcaatcgattgggaaatgggaatggtagagttagcattacaaggagattctagtatcgttccaagcaatagaaaacatagaattcattttaaaggaacgaatgtgtctataattgaattgccaaataagaatgatacagctaaatttgaatggaaagataataaaaggacatctttaaatgacgaagtttttagactactaaagacagcttctcttccatatgaattaaaagatagattgttaaatcaattcatcaatgcgaaaaactctcatgacttaatgaatatcttgcatcatcaggataaggaattgagagggcgtttgttggaaatgatatttactagccaaaactaattgaaataattagaaagtcatttgtttagtgtatatgaagattctgtatggtattcgttatcactggtcacattgaaattgtgaaataagcacctacaacatagactttacaacacttcatgtttcatatcatggggtgtttttctatttaagtcaaagcccatcaaaaaatctcactattcatcaggttaaaggaaacctaatcatagtgagattgtgaattatagtagagtttgtatcgcctcttcaatttgttttgggtctgtttttgaagaaaagcgttcaaagacttgcccatctcgaccgatgagaaacttagcgaaattccattcgactcgttttcctagtgggccggatttctggtcttgtaaccagacatagagagggtctgcttccttaccgttgaccttaatcttggcaaaacgtgggaaggtggtttgaaaatgtaggctacagaaggcgttgatttcctctgcgctgccgggtgcttgtcccataaactgattgcaagggaaatccaatatttcgaagccctgatcttgatagcgttcatagagttcttgaagtccctggtactggggcgttaaaccacatccagtagcagtgttgacaatcaagagaactttgccacgatagctatccaagggagttgcttggttgttttggttcaaaacggaaaaatcataaagtgaagtcatgagggcctcttttctttttctacattgtaacagtttttacttttttcgtcgagtcggatggaagatattgttgaagaataagccttcaatatgatagaaaccgtttacaaataactttaaaaatggtatgatttaattaaaccggtttacttagttgctataaatctctaatttgagatttagttcctattgattttacaatatgtttattggagtgtatacatgcaaacaaaaacaaagaagctcattgtgagtttgtcttcacttgttttatcaggatttttattaaaccattatatgacaattggagcggaagaaacgactacgaataccattcagcaaagccagaaggaagttcagtatcagcaaagggatacaaaaaatttagttgaaaatggtgattttggtcagacggaggacggaagcagtccgtggacaggaagcaaagctcaggggtggtcagcttgggtagaccagaagaatagtgcagatgcctcaactcgagtcattgaggctaaggatggggctatcactatctcaagccatgagaaattaagggcagcgcttcaccgtatggttcctattgaagctaagaaaaagtataaactgcgtttcaagattaaaacagataataaaatcgggattgccaaagttcgtatcattgaggaaagtggtaaggacaagcgattgtggaattctgcaacgacgtcaggaacaaaggactggcagaccattgaagcagactatagcccgactttagatgttgataaaatcaagctggagttattctatgaaacaggaactgggactgtttcctttaaggatattgagctggtagaggtagcagaccagctttctgaggattctcaaacagataaacagcttgaggaaaagattgatttaccaattggaaaaaaacatgttttttctcttgcggactatacttataaggtagaaaatcctgacgttgcttcagtcaaaaatggaattttagaacctcttaaggaagggacaaccaatgtcattgtcagtaaagatggcaaggaagtgaaaaagattcctttgaagattctggcctctgttaaggatgcatacacagaccgtttggatgactggaatggcatcatcgctgggaatcaatactatgattctaaaaatgaacagatggccaaattaaaccaggaattggaaggaaaggtagctgatagcctatccagtatttcaagtcaggcggaccgcacctatttgtgggaaaaattttcaaattataaaacgtctgcaaatctgactgccacttatcggaaattggaggagatggccaagcaagtgaccaatccttcttctcgttattatcaagatgaaactgtcgttcgaacagtcagggattccatggaatggatgcataaacatgtctacaatagtgaaaagagcattgttgggaactggtgggattatgaaatcggtacacctcgtgccatcaacaataccttgtctctgatgaaagaatacttctctgatgaggaaattaaaaaatatacagatgtgattgaaaaatttgtaccagatcccgaacatttccgaaagacgactgataacccattcaaggctctaggtggaaacttagttgatatgggaagggtaaaagtaatagctggtttactgcgtaaggatgatcaagaaatttcttctaccattcgctcgattgagcaagtgttcaagttggtagaccaaggtgaaggtttttatcaagatggatcctatatcgaccacaccaatgttgcctatacgggtgcttatgggaatgttttgattgatggcctgtctcaactgttgccagtcattcaaaagaccaagaatccaatcgataaagataaaatgcaaaccatgtaccactggattgataaatcgtttgctcctttgctggtgaatggagagttgatggatatgagtcgtggacgctcgatcagtcgtgcaaatagcgaggggcacgtggccgcagtagaagtactaagagggattcaccgaatagcggatatgtctgaaggagaaaccaaacaatgtttgcagagtcttgtgaagaccattgttcaatcggatagttattatgatgtctttaagaatttgaagacttataaggatatcagtttgatgcaatccttgttaagtgatgcaggagtcgcaagtgttccaagaccaagttacctatctgcctttaacaagatggataaaacagccatgtacaatgcagagaaagggtttggatttggcttgtcactcttttccagtcgtaccttgaattacgaacacatgaacaaggaaaataaacgtggttggtatacgagtgatgggatgttctatctttacaatggcgatttgagtcactatagcgatggctactggccaacagttaatccatataagatgcctggtacaacagagacggatgctaagagagcggatagcgatacaggtaaagttttaccgtctgctttcgttggaacgagcaaactagatgatgccaatgcgacagcaaccatggatttcaccaactggaatcaaacattgactgctcataagagctggtttatgctaaaggataagatcgcctttttaggaagcaatatccaaaacacttcaacagatactgctgcaactacaattgaccagagaaaactggaatcaggtaatccatataaagtctatgtcaatgataaagaagcctcccttacagaacaagaaaaggattatcctgaaacccaaagtgtctttttagaatcgttcgattcgaaaaagaatattggttactttttctttaagaagagttcaatcagtatgagtaaggctttgcaaaagggagcctggaaggatatcaatgaaggacagtcagacaaggaagttgaaaatgaatttcttacgattagtcaggctcataagcaaaatagagattcttatggctatatgctcattcctaacgtggatcgtgccaccttcaatcaaatgataaaagagttagaaagtagcctcatcgaaaataacgaaacccttcagtctgtttatgatgctaaacaaggagtttggggcattgtgaaatatgatgattctgtctctactatttccaaccaattccaagttttgaaacgtggagtctataccattcgaaaagaaggggatgaatataagattgcctactataatcctgaaacccaggaatcagctccagatcaggaagtctttaaaaagctagagcaagcagctcagccacaagtacagaattcaaaagaaaaggaaaaatctgaagaggaaaagaaccattcggatcaaaagaatctccctcagacaggagaaggtcagtcaatcttggcaagtctagggttcttgctacttggggcattttatctattccgtagaggaaagaacaactaatttgttcatcatctagatgaattacatgaaactgtggaaaatagaaaaaatccgaagaaggccaaatatcttcggatttttcttttaaaaaaggataagttgatacttatccttttttacttcattattatgtgactatagcgttttgaaactagaatagaacgttataactgctaaaagatttctataaattcatttgattttcctaatcaatttgttcgtatcctatttcactccactatattagtccgtctcgctccgtgaggtgcgagacaaaacaaccacccgctatacgggtgcgcgtcgaaggttataccaaaaaaactccaaacgcgatacaataaaggtgttcaatccaattgtaaagcgaaaggagaaaaaatatggcacaaaagactcatagtttatcatacacaaagtggaggtgttctatcatattgtgttcacccctaagtatagacgaaaagtcatctataatcaatatagaagtagtttagacgaaatatttcatcgcttgtgtagttataaaggtgttgaaatgatcgagggtcacttaatgccagaccatgtacacatgttagtcagtattccgtcgaggctaagtgtttcaagttttatggggtatttaaaaggcaaaagtgcactcatgatgtttgacaaacacgccaatctcaagtacaagtttgggaatcggcatttctgggaggaaggttattatgtaagtccagtagggcttaatgaagccacaattaagaaatatagtcaagattaaagaaattatcgagtggatgatttcttcatgagtatgaaaatttgagaacgagtaaagtatgatatatagtaaaatgaaataagaacaggacaaaatcgatcaggacagtcaaatcgatttttaacaatgttttagaagcagaggtgtactattccagtttcaatctactatagcactagataaattgagtgtaaaagaatatgaggatccctttagggatagtggtaagtaataccaaagtctcttaaagaggcaagtgacgagtcaagagcaataaggcttgaacaacgtgaaagccagcgtctttaggcgctggctgatgatttgggcttatagctctgagataaaccacccgttagacgggtagttatgattttatctgagtgtaatatactgttgggcaatctcgctgatgcggtcaaagttgccttgggaagcgagtttattgagttcgccaccaattccaacggcatctgcaccagcagcgaaccattgagggatgttgtttaggccgactcctccggttaccattacggaaacttgtgggatcggtgccttgactgcagagatatatgctggactgagagtactacctgggaagagtttgatgatttcactaccggcttcaagtgcagtcgtgatctctgtgagggtaatacagcctggaatgtacggtgtgctgtagagattgcacattttcgcagtttcagcatggaaagatggagaaacaacgtaatttgctccagctagaatggcatctctagcagttacggcatcaagcacagtacctgcaccgatacaaacactctgatcgtcctgatacaagtctacaagttccttgatgatttgtcctgcatactgattggtataggcgatttcaatagctttgataccgcccttgatacaagcaatcgaggcttgtagtccttcttcctttgtatttcctcgaataacagcgacaattttttgtttttttagttcaataatcgtatctgatttggtcatgtaattctcctaacgaatgatatcttgtgcatttgccagtaaattttcaatactagttgaggaagtggagagatggtctcctggaagagtgcatttgagagttgcgctcgcaactgcaaagtcaatggtagtttttagggaggaatgatggagtagttggtaaagggcaccagatataaaggcatccccgctaccaattcgttgatagactgcagtttttagttggacagactcttcaaatagttcttctagagcataggcttgatagacatttttgtcttgctcatcactagagcggagggtatggaaaatggccttgaaaccataggcttcttttaaaagtcgcatgcgattttccacctcttctaggctagcactgtctcttggaaacatctctagattttggtcatcaatcatgagaggatcaataccgaagcaatagtcagtaaaacgtgcaaacttagaaaattcatacttggcttctaggactgaaatcatctttgttctcagattgagatccattgaaacgacaattcctcggcgcttggcttcttccaagagtaggagaaggatcgcacggacctcttgaccgatagctacggtgattccactaaaatgaaaatggctaatcccctgaaagagagaatccatatctagcatgtttggccgaatctggctgatactcgtatgcttacgatcgtagaaaacttcactttgacgacaaccaaagccgttctccaaatagtagaggccgattcgatcgccaagccgacagattgaactggtatcgatttggtgctgtttcaagaatgtgagaaaacgatctccaatctcgttggcagggagtgcggtaaaaactttcgttgagatacccagggcttgcaaattacaagcgatgttaatttctgatccgccaaaataagtcgaactggcaacatgatcgccgatactggtggcatctaatggtgaaattcgaattaatggttcgccaaacagtaatattttcgtcatccattagttcctttctggtttagaatagctttacttggctaatacttctttcaaataagcagcaacttcatcatcttggcagttttcaaagaagtattcttggaagtatttgccagagatggtgtctttgaggaagtcttggtcgattattttaaggatggtcatcaaatcattgtgggtgatttgtttcacctcgtttaagatacgagcgttgcgttgttcagggattacacgttctcttgggtagccaccgcccatttcttcagcaaataagcgttcaaacatcaatttgagggtcagttctgccccccagccaaatcctttggcataagggatagacaaggcgttaccaccattgatttgagaataaaggtaagcgtcagttgggtccactgctagaccacagacaacaccagggaagctgtttaaagcaagcatagcccctacacccgtaccacagccggtaacaacaaagtcaactgcctttgtatttaaaaggatggcagccattagtccgttctgcacataagttaattgactttctccttcttctccacgcataccatagttaaataattggtagccttttttatctgtcgcttcttttagactatcgtaaataatgtgattcttgctagcttgactattttcattgattaatgcgattttcataagatcttctttctatttttactcaggttgttttccgatgtaggctaagataccgccatctacatataggatgtggccattgacaaaattgctggcatcactagcgagaaagacagcagggcccatcaaatcttcagtatttccccaacgtgcagcaggtgtttttgcaatgatgaactggtcaaatgggtggcgagaaccatcttcttgcaattcacgaagaggtgctgtttgaggagtggcaatataacccggtccaattccgttacattggatattggctccaccgtattcagacgcaatgttgcgggtcaacattttcaagccccctttagcagcagcataagcgctaactgtttcacgtcccagttcgctcatcatcgaacaaatattgataatctttccatgccctttctttatcatagaaggaataactgcctttgaaacgataaatggtgcgtttaagtcaatatcgatgaccttacggaaatcagcggcgctcatttcgcacattggaactcggcggataataccagcgttattaacgaggatgtcaatgacaccaacctcttgttcgatttgcttgaccatggcttggataccgtcctcgtctgtcacgtcacagacatatccatgggcttggatgccaacttcacgataagcttcaatccctttattgaccagatcttgattgatatcgttaaagacaatagtagcgccggcttcagcgtaggatttggcaatagcaaatccaattccataagaagcgccggtgatgagagcaatttttccttttaaagaaaactgctcaattgagaatgatgtatttgtcatttgatacttcctttcaaatttgttaagacttctctataaccaaattatattctagtaaaccggttttgtcaataaataaatatttttatttataaaaaggtttgttttcctaaaaaaacggaagattttgaaatttctgtctattaaactggttaaaaagataatgaaagcgctaatatttttttaaaaaaactattgacaagataaaaataaaggattacaatggggaatataaagtaaaccggtaaacctaaaaagaaaggagaaaagatgaaaattgtacttgtagggcatggacattttgctacagggatttatagttctttacaattgattgcaggtaatcaagaaaatgtggaggcgattgactttgtggaaggaatgtcagcagatgaactcaagcaaaaaatcttacttgcaatttcaaatgaagaagaagttttaatcctaagtgatctcttgggaggatcgccattcaaggtttcttctaccataatgggagaaaatccagccaagacaatgaatgttctctcgggtttgaacttagccatgttaatggaagcagtctttgctagaatggctcatagctttgatgaggttgttaataaatcagtagtggcggcccagggcggagtcgtaaatggtaaagaattgttttcaacggatgcagaggaagaggaagaagatttcgaatcgggtatttaaagggtaaaagaatgataaaaaaggttacgattgaaaaaataaaatcgcctgagcgcttcttagaagtaccacttctgacgaaagaagaagtcggccaggcaatcgataaggttattcggcagttagaactcaaccttgactatttcaaggaagatttcccgacgccagctacctttgataatgtctatccaatcatggataacacggaatggaccaatggtttctggacaggagaactgtggttggcttatgaatacagtcaacaggatgcatttaaaaacatcgctcataaaaatgttctttctttcctggatcgtgtcaataagagagtagaattggatcaccatgatctcggcttcttgtacacaccgtcttgtatggctgaatataagataaatggagatggagaggctagagaagcaaccttgaaagctgcagataagttgattgaacgctatcaagaaaaaggtggttttattcaagcttggggagacttgggcaagaaagagcattaccgtttgattatcgactgcttgctcaatatccaactcttattctttgcttatcaagaaacaggcgatcaaaaatactacgatattgcagaaagccatttctatgcttcagctaataatgtaatccgtgatgacgcttcgtccttccacaccttctattttgatcctgagacaggtcaaccctttaaaggtgtaacgagacaagggtatagtgatgattcatgctgggcacgtggtcaatcatggggagtctatggtattcctttgacttatcgtcacttaaaagacgagtcctgctttgacttgtttaagggtgtgaccaattatttcttgaatcgtctgccaaaagatcatgtgtcctattgggatttgatttttaatgatggtagtgatcaatcacgagattcttcagcaacagctatcgccgtctgtgggattcatgaaatgctaaaacatctcccagaggtggatgctgacaaagatatttataaacatgctatgcatgccatgcttcgttccttgatcgaacattatgcaaatgatcaatttacccctggtgggacaagtctcctccacggtgtgtactcatggcattcaggtaaaggagtggatgaaggcaatatctggggtgactactattacctagaagcccttatccgtttctacaaagactggaacctatattggtaggaggagaaatatgacaatgccaaatattattatgacccgtatcgatgaacggttgattcatggacaaggacaactttgggtaaaatacctaggttgtaatacggtcattgttgccaatgacgaagtaagcacggacaagatgcaacaaactctgatgaaaacagttgtgccagactcagttgccatgcgtttcttccctttgcaaaaggtgattgatatcattcacaaggctaatcctgctcaaacgatctttatcgttgtaaaggatgtgaaggacgctttaaccttggtagaaggtggtgtcactatcaaagaaatcaatattgggaacattcacaatgcccctggtaaagagcaagtgacacgctccatcttcctgggtgaagaggacaaggcggccctcaaggaattgagccaaactcatcaagtaacatttaatacgaaaacaactccaacaggaaatgatggagctgttcaagtcaacattatggactatatttaaaagaggagatcgttatgtcgattaatgtatttcaagcgattttaattggattatggacagctttctgttttagtggaatgctgttaggaatttacaccaatagatgtattgttctgtcatttggtgtcggaattattctaggtgatctgcctactgctcttgcaatgggagctattggtgaattggcttatatgggattcggtgttggtgctggaggtactgttccaccaaacccaatcggacctggtatctttggtaccttgatggctatcactagtgctggtaaagtcagtccagaagcggctcttgccctctctactccgattgctgtggcgattcaattcttacaaactttcgcctacactgtacgtgctggtgcgcctgaaacagctatgaagcacttgaaaaaccataatttgaagaaatttaagttcactctaaatgcaacaatttggttgtttgcctttattggatttaccttgggttgcttgggtgccctttcaatggataccttgttgaaactcgtagactacattccaccggtattacttacaggtttgacagttgctggtaaaatgctcccagctatcggttttgcgatgatcttgtcagtgatggctaagaaagagttgattccctttgtcttgttgggatatgtttgtgcagcttatctaaacatcccaacaattggtattgcaattgtaggtactatctttgctttgattgaattttataacaagccaaaaacagcggatcatgtggtagaggaggaagcacacgatgactggatctaacaaattaacaaaacgtgattatcttaaaacgtctttgcgggcattcttttgtcaaaatggatttaactatagtaactatcaagggttgggatatgccaatgtgatgtatcctgctttgaaaaaacactatggagaggatcaggaaggtttctaccaagccttggaagaaaactgtgaattctataataccaacccacacttcctgccttttattaccagcttgcatcttgtaatgttggaaaatggccgtccggcaaaagaaacacgtagcatcaagatggccttgatgggaccattggcaggtattggggattctctttctcaattctgtttagctccattgttctcaaccatcgcagcttcgtttgctcaagaaggcttggttgtcggtccaatcttgttcttccttgcgatgaatacgattttaacagcgattaaattgtcaactggtctgtatggatacaaactaggaacaactgtgattgataaactaagcgaacagatggcaacgatttctcgtattgccaatattatcggtgtaaccgtaattgctggtttggcagcgacatctgttaagattatggtgccgattacctttgctgcaggggaagttaaagcagacgctaaacaaagtatcgtaagtattcagggaatgcttgataaggttgctccagctcttctaccagccctatttacacttttagtttactacttgatcaaagaaaagaaatggacaacatataaactcgttattttaacagttatcatcggaattatcggaagctggcttaagattatagcttaatggatacaacattgttttatggaatagtgattgtcttggcagtgagtccccttttactgtcaagctttcattctattcgtcagcaaaagttgcttcgcaaacagatggagcaacgacaagagtatttagcttctttaacatttggtgatgaagtgttgttattgtctggaattcatggaaaaatcatttctatccaagatgacttggtctccttgcagattgcaaaaggtgtggtcatccatgtagaaaaggaaagtgtaatgggaaagacaaaagaactgctttttaagtagttctttttctggtaatagataatgaaagaagaaagaagacaattttttgaaagagtcgatggaaatcaatgtcgtgattatatcttgtcgcactgttcaaaagactatgagaaagtcaagagttcccttgaacgcttgatggacaatcgttttatgtttgatagtccttgggatatggagccttgttcaaaaatccatcaaatccagccgatggtatgggatcaagtatttgaagatgatccagaatggtcttatatgctcaatcgacaagaatatctcttgcagtttatgatagggtatctggtagaaggagataaggactatattcaaaagtgcaagttctttctatttgattggattgagcaggtgagagaattttctcctcaatccttgatgactagaaccttggatacgggtattcgttcctttacttggttgaaactactcttgctcctcttgaaatttgacttgctagaggagaaagaactagagaaaattttggtcagtctagaaaagcagattgactttatgaaaagctactatcgcgccaagtacacccttagtaactgggggattttacaaacaattccgatgcttgctatctatcatttcttttcagataagatggatctagaagaagcttaccattttgcttcagaggagttgaaacagcaaattgagacacagattttaggagatggaagccagtttgaacagtcgattctctatcatgtagaggtttataaagccttgctggatttgtgtctcttgcttccagacttgcaagatagttaccaagagttgctggaaaagatggcgacctatattcaaatgatgacaggcttagatggacggactttggcttttggtgatagcgattctacagaaacgacagaaattttgagcctgtctgctgtggttttgaaccaggaagaccttcttaacggtctggatgttaaagttgatttgcttagcctcttgttcctggggcgagaaaaggtcaagcgactgcaggaatttgaaaagagagcttggcagcctaagtccatgatctttgaagactctggacatgtctgcattaaggatgaacatcgttatctatttttcaaaaatggtccgctaggaagtgcccatagtcatagtgacgagaatagtttttgcttacagtatcaaggccaacctattttcatagatgctgggcgttattcttatcgggagatatatgaacgttatctcttaaagagtgcttggagtcattcgacctgcattgtagatgggaaagctccggaaagaatcacgggatcctgggaatatgaatactatcctcactccctgttttgtcaccataaagaaagggagggagtgcattatattgagggggcttattggtcagcagaacctgatttgccttatcttcacaggagaaaaatcctcatgttggtagaggatgtctggctcttggtagatgacatcaggtgtcaaggtcaacatgaggtgttgactcagtttatccttgacaaggatgtgacctatcaagatgggaaaatcaatcagttgagactatggagtgaagttgattttgatttggaagataccatcatttctcctaaatccccaattattcaccccaaatctaaaaaccatccagaatccttgccttagcttagatcctggatggtttcttttttcacccaatgggtgttttttactagacaaaaaagagtttcccctttatggtataagtgtagaaaaaaacacaaaaagaaaggaaactcacatgaacagtttaccaaatcatcacttccaaaacaagtctttttaccaactatctttcgatggaggtcatttaacccagtatggtggtcttatcttttttcaggaacttttttcccagttgaaactaaaagagcggatttctaagtatttagtaacgaatgaccaacgccgctactgtcgttattcggattcagatatccttgtccagttcctctttcaactgttaacaggttatggaacggactatgcttgtaaagaattgtcagctgatgcctactttccaaaattattggaaggagggcagcttgcttcacagccaaccttatcccgttttctttccagaactgacgaggaaacagtccatagtttgcgatgcctcaaccttgaattggtcgaattctttttacagtttcaccagctaaaccaactcattgtagatatcgattctacccatttcacaacttatggcaagcaagaaggtgttgcttataacgcccactatcgtgctcatggctatcatcctctttatgctttcgaggggaagacaggttattgtttcaatgcccagcttcgtcctggtaatcgttattgttctgaagaggcagacagctttatcacacctgttttagaacggtttaatcaacttctctttcgaatggatagtggctttgcgaccccaaaattatacgatttaattgaaaaaacagggcaatactacctcataaaactcaagaaaaatactgttctgagccgtcttggagacctttccctcccttgcccacaggatgaggacttaaccatcttgccccactccgcctactcagaaactctctatcaagcaggatcttggtcgcacaagcgtcgtgtctgccagttctctgaacgaaaagaaggaaacttgttctacgatgttatttctctcgttacaaatatgacgagtggaacaagccaagaccagtttcagctttatcgtggacgtggtcaagccgagaatttcatcaaggagatgaaggagggattttttggcgataaaacggatagttcaaccttaatcaaaaacgaagttcgtatgatgatgagctgtatcgcctacaatctctatctttttctcaaacatctagctggaggtgacttccaaactttaacaatcaaacgcttccgccatctttttcttcacgtggtaggaaaatgtgttcgaacaggacgcaagcagctcctcaaattgtctagtctctatgcctattccgaattgttttcagcactttattctaggattagaaaagtcaacctgaatcttcctgttccttatgaaccacctagaagaaaagcgtcgttaatgatgcattaaagaacagtcgagatgaaaaaatcgtgtgacgaaccaagggaggagtctgcccttttgaggaaatctagcgaggaaaaacgatactggaacagcagaaagtaaaactgacctcatgaggaggaagaaagtggctcatgaggtcaggggttttgtaagttacatctagttgagagaggtatgaatgatttgggtaaatacaatgagcttgaaagaagtagcaaactcaccaagcgccaattctttgagaatcagatgctggattataccatcattgcgcatgagagttttgaaatcatccgtcattctgtctaccagacagatgatcgtgaagtggaaaatgctctggcttttgaagtgaaaaatgatgaaacagacaagctgattctgttattaagcgaggatattggtgtaggtgaaaaattgtgcctcgttgacggaacaaaaatgcgtggaaaatgtttagtatatgataaaataaatgagagaatgattcgcttgcagtgctagaaataggcattttgaatagtgaatatgttataataagtattagtaggaggtgttttagattggagaagaaactgaccataaaagacattgcggaaatggctcagacctcgaaaacaaccgtgtcattttacctaaacgggaaatatgaaaaaatgtcccaagagacacgtgaaaagattgaaaaagttattcatgaaacaaattacaaaccgagcattgttgcgcgtagcttaaactccaaacgaacaaaattaatcggtgttttgattggtgatattaccaacagtttctcaaaccaaattgttaagggaattgaggatatcgccagccagaatggctaccaggtaatgataggaaatagtaattacagccaagagagtgaggaccggtatattgaaagcatgcttctcttgggagtagacggctttattattcagccgacctctaatttccgaaaatattctcgtatcatcgatgagaaaaagaagaaaatggtcttttttgatagtcagctctatgaacaccggactagctgggttaaaaccaataactatgatgccgtttatgacatgacccagtcctgtatcgaaaaaggttatgaacattttctcttgattacagcggatacgagtcgtttgagtactcggattgagcgggcaagtggttttgtggatgctttaacagatgctaatatgcgtcacgccagtctaaccattgaagataagcatacgaatttggaacaaattaaggaatttttacaaaaagaaatcgatcccgatgaaaaaactctggtatttatccctaactgttgggccctacctctagtctttaccgttatcaaagagttgaattataacttgccacaagttgggttgattggttttgacaatacggagtggacttgcttttcttctccaagtgtttcgacgctggttcagccctcctttgaggaaggacaacaggctacaaagattttgattgaccagattgaaggtcgcaatcaagaagaaaggcaacaagtcttggattgtagtgtgaattggaaagagtcgactttctaaaatgaaggaaaatgacttgcaatctctgttaagaaataaaataatcccacctagaacaagctaggtgggattatttgcctatgaaatgagaaattatgggagcaagctcctaaatcaactgtttttgatctacttctttaactacttgataaaagttatagaagtaggccaaacttgaaatgatggttacgactaggaatattgaaaatttccattggacagggttggttaaaagttgtggaaaggatatgaggagaaagaagagggctgcgttgaggacaggtatccgttttgattgtattttctcaagtcctttattgagcgcaggaagaaagaggagtaggagtagtaaaactgtatgagaaatagctcctgaagtaagggcgaagaaaaggaaaatactgataaaaacatgaatgatcagtagtctagctagtgatttcataaggcacctcctaatcctggtcttttttagctcttgcaatacgaagtgagtcgacaatatgtatcatcactccgaaaaagaaagctcccagtatagttttaaaaatatgttttgtatttagaagagaactgataaaatttggattttcacttgttagggtatcaatgagtggaattataaaaaatatcactgttccataaatcgaacctgctttcagaccaggataacgtaactgtttcttttcttttttcatgagtttcctcctaatcctcatcttgatttttcttagtttttgcaatgcgacgggagatgaggaactgtatgctcgctccgaagaaaatagaaccgagaatacttgatacaccatttcttatagtgagaagagaatgaaaatagtcctgaccttcatctatgagtatcctgagaagaggagttataaaaaacatccatagaccaaagaacaaacctgctttcagacctgggtagtgtagttgcttgctttctttctcattcagcatatctggttcaatgactgtgatgcctgtttttttcatttggtaggtgacatagccagaagcgatgagggcaatcactaaaatcagaggaggatagattagagccacttcttgagggtatttataggccagaaggagtggaataagatttccgaaaatcatcagataaaagaggatgataaagacttggttcccaatactatcggcctcacgccgtttgtattcgtcaaggggaccagaaataccgtatgtgcgtttgatcagtttttcagtgaaggtttcttttttcatgagtttgctccttttttaaaaatcttcctcccaaaagagactgttgaggtcagtttggaggctgcgggcgagattgagacagagttccaaggttggattgtacttgtcgttttcaatcatattgatagtctgtctcgagacaccgatatccttggcgagttcgagctgggaaatacccaattccttgcgaaattctttcacacgattcatctgttctcctttctgatttatgtcgtatatatttgactatattatagtcttttaaacataaagtgtcaagtatttttgacatattttttgaagaaatagtagtctccttgtcctatttgtctgacaagtgcaagctggtcggatttgtggtaaaatagataagatatgacaaaagaatttcatcatgtaacggtcttactccacgaaacgattgatatgcttgacgtaaagcctgatggtatctacgttgatgcgactttgggcggagcaggacatagcgagtatttattaagtaaattaagtgaaaaaggccatctctatgcctttgaccaggatcagaatgccattgacaatgcgcaaaaacgcttggcaccttacattgagaagggaatggtgacctttatcaaggacaacttccgtcatttacaggcatgtttgcgcgaagctggtgttcaggaaattgatggaatttgttatgacttgggagtgtctagtcctcaattagaccagcgtgagcgtggtttttcttataaaaaggatgcgccactggacatgcggatgaatcaggatgctagcctgacagcctatgaagtggtgaacaattatgactatcatgacttggttcgtattttcttcaagtatggagaggacaaattctctaaacagattgcgcgtaagattgagcaagcgcgtgaagtgaagccgattgagacaacgactgagttagcagagattatcaagttggtcaaacctgccaaggaactcaagaagaaggggcatcctgctaagcagattttccaggctattcgaattgaagtcaatgatgaactgggagcggcagatgagtccatccagcaggctatggatatgttggctctggatggtagaatttcagtgattacctttcattccttagaagaccgcttgaccaagcaattgttcaaggaagcttcaacagttgaagttccaaaaggcttgcctttcatcccagatgatctcaagcccaagatggaattggtgtcccgtaagccaatcttgccaagtgcggaagagttagaagccaataaccgctcgcactcagccaagttgcgcgtggtcagaaaaattcacaagtaagagggaaaaagatggcagaaaaaatggaaaaaacaggtcaaatactacagatgcaacttaaacggttttcgcgtgtggaaaaagctttttacttttccattgctgtaaccactcttattgtagccattagtattatttttatgcagaccaagctcttgcaagtgcagaatgatttgacaaaaatcaatgcgcagatagaggaaaagaagaccgaattggacgatgccaagcaagaggtcaatgaactattacgtgcagaacgtttgaaagaaattgccaattcacacgatttgcaattaaacaatgaaaatattagaatagcggagtaagatatgaagtggacaaaaagagtaatccgttatgcgaccaaaaatcggaaatcgccggctgaaaacagacgcagagttggaaaaagtctgagtttattatctgtctttgtttttgccatttttttagtcaattttgcggtcattattgggacaggcactcgctttggaacagatttagcgaaggaagctaagaaggttcatcaaaccacccgtacagttcctgccaaacgtgggactatttatgaccgaaatggagtcccgattgctgaggatgcaacctcctataatgtctatgcggtcattgatgagaactataagtcagcaacgggtaagattctttacgtagaaaaaacacaatttaacaaggttgcagaggtctttcataagtatctggacatggaagaatcctatgtaagagagcaactctcgcaacctaatctcaagcaagtttcctttggagcaaagggaaatgggattacctatgccaatatgatgtctatcaaaaaagaattggaagctgcagaggtcaaggggattgattttacaaccagtcccaatcgtagttacccaaacggacaatttgcttctagttttatcggtctagctcagctccatgaaaatgaagatggaagcaagagcttgctgggaacctctggaatggagagttccttgaacagtattcttgcagggacagacggcattattacctatgaaaaggatcgtctgggtaatattgtacccggaacagaacaagtttcccaacgaacgatggacggtaaggatgtttatacaaccatttccagccccctccagtcctttatggaaacccagatggatgcttttcaagagaaggtaaaaggaaagtacatgacagcgactttggtcagtgctaaaacaggggaaattctggcaacaacgcaacgaccgacctttgatgcagatacaaaagaaggcattacagaggactttgtttggcgtgatatcctttaccaaagtaactatgagccaggttccactatgaaagtgatgatgttggctgctgctattgataataatacctttccaggaggagaagtctttaatagtagtgagttaaaaattgcagatgccacgattcgagattgggacgttaatgaaggattgactggtggcagaacgatgactttttctcaaggttttgcacactcaagtaacgttgggatgaccctccttgagcaaaagatgggagatgctacctggcttgattatcttaatcgttttaaatttggagttccgacccgtttcggtttgacggatgagtatgctggtcagcttcctgcggataatattgtcaacattgcgcaaagctcatttggacaagggatttcagtgacccagacgcaaatgattcgtgcctttacagctattgctaatgacggtgtcatgctggagcctaaatttattagtgccatttatgatccaaatgatcaaactgctcggaaatctcaaaaagaaattgtgggaaatcctgtttctaaagatgcagctagtctaactcggactaacatggttttggtagggacggatccggtttatggaaccatgtataaccacagcacaggcaagccaactgtaactgttcctgggcaaaatgtagccctcaagtctggtacggctcagattgctgacgagaaaaatggtggttatctagtcgggttaaccgactatattttctcggctgtatcgatgagtccggctgaaaatcctgattttatcttgtatgtgacggtccaacaacctgaacattattcaggtattcagttgggagaatttgccaatcctatcttggagcgggcttcagctatgaaagactctctcaatcttcaaacaacagctaaggctttagagcaagtaagtcaacaaagtccttatcctatgcctagtgtcaaggatatttcacctggtgatttagcagaagaattgcgtcgcaatcttgtacaacccatcgttgtgggaacaggaacgaagattaaaaacagttctgctgaagaagggaagaatcttgccccgaaccagcaagtccttatcttatctgataaagcagaggaggttccagatatgtatggttggacaaaggagactgctgagacccttgctaagtggctcaatatagaacttgaatttcaaggttcgggctctactgtgcagaagcaagatgttcgtgctaacacagctatcaaggacattaaaaaaattacattaactttaggagactaatatgtttatttccatcagtgctggaattgtgacatttttactaactttagtagaaattccggcctttatccaattttatagaaaggcgcaaattacaggccagcagatgcatgaggatgtcaaacagcatcaggcaaaagctgggactcctacaatgggaggtttggttttcttgattacttctgttttggttgctttctttttcgccctatttagtagccaattcagcaataatgtgggaatgattttgttcatcttggtcttgtatggcttggtcggatttttagatgactttctcaaggtctttcgtaaaatcaatgaggggcttaatcctaagcaaaaattagctcttcagcttctaggtggagttatcttctatcttttctatgagcgcggtggcgatatcctgtctgtctttggttatccagttcatttgggatttttctatattttcttcgctcttttctggctagtcggtttttcaaacgcagtaaacttgacagacggtgttgacggtttagctagtatttccgttgtgattagtttgtctgcctatggagttattgcctatgtgcaaggtcagatggatattcttctagtgattcttgccatgattggtggtttgctcggtttcttcatctttaaccataagcctgccaaggtctttatgggtgatgtgggaagtttggccctaggtgggatgctggcagctatctctatggctctccaccaagaatggactctcttgattatcggaattgtgtatgtttttgaaacaacttctgttatgatgcaagtcagttatttcaaactgacaggtggtaaacgtattttccgtatgacgcctgtacatcaccattttgagcttgggggattgtctggtaaaggaaatccttggagcgagtggaaggttgacttcttcttttggggagtgggacttctagcaagtctcctgaccctagcaattttatatttgatgtaagaatggcaccctgatgtttcagggtgtttttgtgtttaaatacacaatgaaaatcaaagaacaaactagaaagctaactttaggctgctcaaaatatagtagattgaaactagaatagtacacatctacttctaaaatattgttagaaatcgatttgactgtcctgattgatttgtcctgttcttatttcgttttaatatacagttttgagatggttgatagaactgacgaagtcagctcaaaacacggttttgaggttgtagataaggagaagctgatgtggtttgaagaggttttcgaagagtgtaaaaaaatattggtcagttaaagtcaaaactcttgaccttttctgaccaatgtagtatattatgaacgtaaggtaaatgaaagccttactagaacacttatttaaagtaaaatagaaagaggtgggtctatgtttcatctagaaatcttcagaagtaaagatagtctactcctgcttgaaaaagaaaaaccagaaatagtacgtagggtagcgatctagctagtctaaattttttaaaacaatggtcaaagatagtcaatatcagtaatcataactaagtaaacaaaaagaggtaaagaatatgaataacaactttaataattttaataacatggatgatttatttaaccaattgatgggtggtatgcgaggatacagttctgaaaatcgccgttacttaattaatggacgcgaagtcacacctgaggaatttgctcactatcgtgcgactggtcaattaccaggaaatgcagaaactgatgtgcaaatgccacaacaggcatcaggtatgaaacaaggcggtgtccttgcaaaactaggtcgaaacttaacagcagaagcgcgtgagggcaagttggatcctgttatcggacgaaacaaggaaattcaagaaacatctgaaatcctctcacgccgcaccaagaacaatcctgttttggtcggagatgcaggtgttggtaagacagcagttgtcgaaggtctagcgcaagccattgtgaacggagatgttcctgctgctatcaagaacaaggaaattatttctattgatatctcaggtcttgaggctggtactcaataccgtggtagctttgaagaaaatgtccaaaacttagtcaatgaagtgaaagaagcagggaatattatcctcttctttgatgaaattcaccaaattcttggtgctggtagcactggtggagacagtggttctaaaggacttgcggatattctcaagccagctctctctcgtggagaattgacagtgattggggcaacaactcaagacgaataccgtaacaccatcttgaagaatgctgctcttgctcgtcgtttcaacgaagtgaaggtcaatgctccttcggcagagaatacttttaaaattcttcaaggaattcgtgacctctatcaacaacaccacaatgtcatcttgccagacgaagtcttgaaagcagcggtggattattctgttcaatacattcctcaacgtagcttgccagataaggctattgaccttgtcgatgtaacggctgctcacttggcggctcaacatccagtaacagatgtgcatgctgttgaacgagaaatcgaaacggaaaaagacaagcaagaaaaagcagttgaagcagaagattttgaagcagctctaaactataaaacacgcattgcagaattggaaaggaaaatcgaaaaccacacagaagatatgaaagtgactgcaagtgtcaacgatgtggctgaatctgtggaacgaatgacaggtatcccagtatcgcaaatggaagcttcagatatcgaacgtttgaaagatatggctcatcgcttgcaagacaaggtgattggtcaagataaggccgtagaagttgtagctcgtgctatccgtcgtaaccgtgctggttttgatgaaggaaatcgcccaatcggcaacttcctctttgtagggtctactggggttggtaagacggagcttgctaagcaattggcactcgatatgtttggaacccaggatgcgattatccgtttagatatgtctgaatacagtgaccgcacagctgtttctaagctaattggtacaacagcaggctatgtgggttatgatgacaatagcaataccttaacagaacgtgttcgtcgcaatccatactctatcattctcttggatgaaattgaaaaggctgaccctcaagttattacccttctcctccaagttctagatgatggtcgtttgacagatggtcaaggaaatacagtaaacttcaagaacactgtcattattgcgacctcaaatgctggatttggctatgaagccaacttgacagaagatgcggataaaccagaattgatggaccgtttgaaacccttcttccgtccagaattcctcaaccgctttaatgcagtcatcgagttctcacacttgactaaggaagacctttctaagattgtagatttgatgttggctgaagttaaccaaaccttggctaagaaagacattgacttggtagtcagtcaagcggctaaagattatatcacagaagaaggttacgacgaagtcatgggggttcgtcctctccgtcgcgtggttgaacaagaaattcgtgataaggtgacagacttccacttggatcatttagatgctaaacatctggaagcagatatggaagatggcgttttggttattcgtgagaaagtctaagacagaattttgaggataaaaaagaaggagccagctgaaaaaaactggttcctttttaggtacgacaggcatgtcgtatagtagaagtgtattattctagtttcaatatactatagtagctcagaagtcggtacttaaacgtgctatatcaaaaccagtcctggaaaaacgtggactggtttcgtgtttggattattaccttgaacgacatgcgttaaaagttagttgaaccgccgtatgccgaatggtacgtacggtggtgtgagaggggctagagattatcccctactcgattttaaatcacatgacgttcaaaggcatcatctgaaatcccttgttccaagatgagttttgcccattctttagcagagaagaggctgtggtccttgtagtttccgcaagattcgatggttgtccctgggacatcttcccaagtagtagtttcagcgatttccttgagcgaatccttgataacagctgcgattttagcactggtgtgacgtccccacataatcatgtggaagcctgtgcggcaaccaaatggtgaacagtcaatcatgccgtcaatgcgggtacggatgagtttggctaagaggtgctcgatagtgtgaaggccggcagtagggatagagtcttcgtttggttgcaccaagcgaatatcataattggagatgatgtctccttttggtcctgtttcttccccaatcaagcgaacatagggtgctttgacaatggtgtggtcaagttcaaaactttcgacaataacttcttttgacatggtaaatcctttcagttttcttctctcattatatcataaaggttgctcctgagacagagagaaaacctctccgaggctggagaggttgaaatctttacttacgatataagcggtcgtattggtagtatgggtcaaaggttacgttgatacccagtttacgaaggacattcttgtcttcatcagtcaagatgatggttgagtgggcttcgcttcctttgaggttgccgagttcttccatagcgcgggcagcatcaggattttctgtagctgtgatagcaagtgcaatcaggatttcatttgaatgaaggcgtggattgcggctaccgagatgatcgattttaagaccttggattggcttaacaacttcaggctcgattagttttacttctttagcgatgtcagctgattttttgatggcgttgatcaaggcagcggctgtaggaccaaagagttctgagttcttaccagtgatgatttccccatttggcaattcaaaggctagggctggtccaccagtttcttctgctttttggcgcgcaacgacagcaaccttacggtctgcaggtgtgataccgaggtcgttcatgagcaactcaattttcttgacggcagcttcgccaactttttcagctttgaagtcaagaactgtttgatagtaacggcggatgatttcttgtttagaagcttcgacagcggcctcgtcatctgtaatagcgaaaccaaccatgttgacacccatatctgtcggtgaagcgtatggtgattttccgagaatacgttccaacatgcgtttgagcactgggaagatttcgatatcacggttgtagttgacagtggtttctccataggtttgaagatggaaggggtcaatcatgttgacatcatcaaggtcagctgtggcagcttcataagccaagttaactggatgatgaaggggaagattccaaacagggaaggtttcaaatttagcgtagccagatttgatgccattgatttggtcgtggtacatattggacatacacgttgccaattttccagaaccaggtccaggagcggttacgacaatcaagttgcgactggttttgatgtagtcgtttttgcccatgccttctggggaaatgatgtgatccatatccgtcggatatcctttgattggataatgaagataagaatcaattccgtttttctcaagttgattgcggaaggcatctgcagcgggttggccagcgtattgtgtaatgacaacggaaccaacaaaaatccctaattcattgaatttatcaatcaaacgaagaacttcttggtcataagaaatgcctaagtcgccacgtgctttggaatgttcaatgttgctagcattaatggcaatcacaacctcaacctgctctttcaattcttgcaagagcttgattttgttgtcaggttcataaccaggaaggacacgagcagcgtggaaatcttctaacattttaccgccaaactctaagtagagcttgccgtcaaattggttaatgcgctccaaaatatggtcgcgttgtaaattcaaatattgttcagaactaaaagcttgttttttcatttttttacctctggactctattataataaaaaattggaagttaggaaactacggagctaaaaaagaaattaaaaagattaagcaaacgcttgcacaaaattttaaaaagtgctatcatagactatagattatgaaaataatgaggtaaacagatgcaagaaaaatggtggcacaatgccgtagtctatcaagtctatccaaagagttttatggatagtaatggagatggagttggtgatttgccaggtattaccagtaagttggactatctagctaagctaggaatcacagcaatttggctttctcccgtttatgacagccctatggatgataatggctatgatattgctgattatcaagcgattgcggctatttttggaaccatggaggacatggatcagctgattgcagaagctaagaagcgtgacattcgtatcatcatggacttggtggtcaatcatacctcagatgaacatgcttggtttgtcgaagcctgtgaaaatactgacagccctgagcgagactactatatctggcgcgatgaacccaatgacctagattctatctttagtgggtctgcttgggaatacgatgaaaagtcaggtcaatactatctccactttttcagcaagaaacagccggatctcaactgggaaaatgaaaaacttcgccagaaaatttatgagatgatgaacttctggattgataaaggtattggtggtttccgtatggatgttattgacatgattggcaaaattcctgacgagaaggtagtcaataatggtcctatgctccatccctatctcaaggaaatgaatcaggcgacctttggagataaggatctcttgacagtaggggagacttggggagcaactccagagattgccaagttctactctgatccaaaggggcaagaattgtctatggtcttccagtttgaacatatcggtcttcagtatcaggaaggtcagcctaaatggcactatcaaaaagagctgaatatcgctaagttaaaagaaatcttcaacaaatggcagacagagttaggagttgaggacggctggaattccctcttctggaacaaccatgacctccctcgtattgtctcaatctggggaaatgaccaagaataccgcgaaaaatctgccaaagcctttgcaatcttacttcatctcatgagaggaactccttatatctaccaaggtgaggagattgggatgaccaactatccgtttgaaacactggatcaagtagaagatattgaatctctcaactatgcgcgtgaggctcttgaaaaaggtgttccgattgaagaaatcatggacagtatccgtgttattggacgtgacaatgcccgtacccctatgcaatgggacgagagcaaaaacgctggtttctcaacaggtcaaccttggttggcggttaatccaaattacgagatgatcaatgtccaagaagcgctggcaaatccagattctattttctatacctatcagaaactggtccaaattcgcaaggagaatagctggctagttcgagctgactttgaattgcttgatacggctgataaggtctttgcttatatacgtaaggatggcgaccgtcgcttcctagttgtggctaacttgtccaatgaagagcaagacttgacagtagaaggaaaagtcaaatctgtcttgattgaaaacactgcggctaaagaagtacttgaaaaacaggtcttggctccatgggatgctttctgtgtggaattactataaatattttttgcagaaaaatttaaaattgaaatcgtataaaaacaagggaggactgtataaaagacagaaatcctttgttttttataaccaaagtttataaactttcattcttgaaattcaattaactttacaaattcccactattaaggagaaagaagatgaacataaagaagcgtgtccttagtgcaggcctgacttttgcatctgctttgcttttacccaaatcattcatacctctctcaactagatgtaacttacaaaacccctgacctcatgagccactttcttcctcctcatgaggtcagttttactttctgctgttccagtatcgtttttcctcgctagatttcctcaaaagggcagactcctcccttggtgcgtcacacgattttttcatctcgactgttctttaatgcatcattaacgacgcttttcttctaggtggttcataaggaacaggaagattcaggttgacttttctaatcctagaataaagtgctgaaaacaattcggaataggcatagagactagacaatttgaggagctgcttgcgtcctgttcgaacacattttcccaccacgtgaagaaaaagatggcggaagcgtttgattgttaaagtttggaagtcacctccagctagatgtttgagaaaaagatagagattgtaggcgatacagctcatcatcatacgaacttcgtttttgattaaggttgaactatccgttttatcgccaaaaaatccctccttcatctccttgatgaaattctcggcttgaccacgtccacgataaagctgaaactggtcttggcttgttccactcgtcatatttgtaacgagagaaataacatcgtagaacaagtttccttcttttcgttcagagaactggcagacacgacgcttgtgcgaccaagatcctgcttgatagagagtttctgagtaggcggagtggggcaagatggttaagtcctcatcctgtgggcaagggagggaaaggtctccaagacggctcagaacagtatttttcttgagttttatgaggtagtattgccctgttttttcaattaaatcgtataattttggggtcgcaaagccactatccattcgaaagagaagttgattaaaccgttctaaaacaggtgtgataaagctgtctgcctcttcagaacaataacgattaccaggacgaagctgggcattgaaacaataacctgtcttcccctcgaaagcataaagaggatgatagccatgagcacgatagtgggcgttataagcaacaccttcttgcttgccataagttgtgaaatgggtagaatcgatatctacaatgagttggtttagctggtgaaactgtaaaaagaattcgaccaattcaaggttgaggcatcgcaaactatggactgtttcctcgtcagttctggaaagaaaacgggataaggttggctgtgaagcaagctgccctccttccaacaattttggaaagtaggcatcagctgacaattctttacaagcatagtccgttccataacctgttaacagttgaaagaggaactggacaaggatatctgaatccgaataacgacagtagcggcgttggtcattcgttactaaatacttagaaatccgctcttttagtttcaactgggaaaaaagttcctgaaaaaagataagaccaccatactgggttaaatgacctccatcgaaagatagttggtaaaaagacttgttttggaagtgatgatttggtaaactgttcatgtgagtttcctttctttttgtgtttttttctacacttataccataaaggggaaactcttttttgtctagtaaaaaacacccattgggtgaaaaaagaaaccatccaggatctaagctaaggcaaggattctggatggtttttagatttggggtgaataattggggttttagctgcttgcggccaatcaggttcagatacaaaaacttactcatcaacctttagtggaaatccaactacatttaactatctattagactattacgctgataatatagtcaattgaaacaagaacaagacaaaagagcctcataaaaggtattgcaacttggtaatacctttttgaggtgctttttgatatgagcccatgttttctcaataggattgtactcaggtgagtagggaggaagaggtaaaagtttatacccaaactcttcacacaagagttctaacttacccattctatggaatcttgcattatccataataataaccgatggtgtgtttaatgttggtaagagaaatttctgaaaccaagcttcaaaaaagtcgctcgtcatcgtctcttcgtaagttattggagcgattaactcaccatttgttagacctgcaaccaaagaaatcctctgatatcttcttccagatactttgcctcttcttaactgaccttttaatgagcgaccatattctcgataaaaataagtatcgaatcctgtttcatcaatctaaacaggtgctaggtgctttaaactattaaaattcttaagaaataaggctactttttctgggttttgttcatagtaggtgtggttctttttttcgagtgtagcccatagctttgagcgcatagtggatggtagttggatgacagccaaattcagaagctatttcagtcaaataagcgtctggattgtcagtaagatagtttttaagtctatctctatcaacttttcttggttttgttccttttacttggtggtttagctctcctgttttctcttttagctttaaccagccataaatggtattacgtgatatttggaaaacgtgtgatgcttctgttatactacctgttcgctcacaataagagagaacttttttacgaaaatctattgaatatgccataagaagattataccacattgtgtactatattagattgaaactagaatagtacacctctgcttctaaaacattgttagaaatcgatttgactgtcctgaacgatttgttctgttcttatttcattttactatatttttgtttcgcgggaagtctactaagatacttaaagatgcagatagtaaaaataaaggtgtagacattaccgtaaaaaagtgatataatcgtataatgttcaatgtataggtattaatcatgagtagacgttttaaaaaatcacgttcacagaaagtgaagcgaagtgttaatatagttttgctgactatttatttattgttagtttgttttttattgttcttaatctttaagtacaatatccttgcttttagatatcttaatctagtggtaactgcgttagtcctactagttgccttggtagggctactcttgattatctataaaaaagctgaaaagtttactatttttctgttggtgttctctatccttgtcagctctgtgtcgctctttgcagtacagcagtttgttggactgaccaatcgtttaaatgcgacttctaattactcagaatattcaatcagtgtcgctgttttagcagatagtgagatcgaaaatgttacgcaactgacgagtgtgacagcaccgactgggactaataatgaaaatattcagaaattactagctgatatcaagtcaagtcagaataccgatttgacggtcaaccagagttcgtcttacttggcagcttacaagagtttgattgcaggggagactaaggccattgtcctaaatagtgtctttgaaaacatcatcgagtcagagtatccagactacgcatcgaagataaaaaagatttatactaagggattcactaaaaaagtagaagctcctaagacgtctaagagtcagtctttcaatatctatgttagtggaattgacacctatggtcctattagttcggtgtcgcgatcagatgtcaacatcctgatgactgtcaatcgagataccaagaaaatcctcttgaccacaacgccacgtgatgcctatgtaccaatcgcagatggtggaaataatcaaaaagataaattgactcatgcgggcatttatggagttgattcgtccattcacaccttagaaaatctctatggagtggatatcaattactatgtgcgattgaacttcacttcgtttttgaaattgattgatttgttgggtggaattgatgtttataatgatcaagaatttactgcccatacgaatggaaagtattaccctgcaggcaatgttcatcttgattcagaacaggctctcggttttgttcgtgagcgctactccctagcagatggcgatcgtgaccgcgggcgccatcaacaaaaggtgattgtggctatccttcaaaaattaacgtcaaccgaagtgctgaaaaattatagtacgatcattaatagcttgcaagattctatccaaacaaatatgccacttgagaccatgataaatttggtcaatgctcagttagaaagtggagggaattataaagtaaattctcaagatttaaaagggacaggtcggatggatcttccttcttatgcaatgccagacagtaacctctatgtgatggaaatagatgatagtagtttagctgtagttaaagcagctatacaggatgtgatggagggtagatgaaatgatagacatccattcgcatatcgtttttgatgtagatgacggtcccaagtcaagagaggaaagcaaggctctcttggcagaatcctacagacagggggtgcgaaccattgtttctacctctcaccgtcgcaagggcatgtttgaaactccggaagagaagatagcagaaaactttcttcaggttcgggaaatagctaaggaagtggcgagtgacttggtcattgcttacggggctgaaatttattacacaccagatgttctggataagctggaaaaaaagcggattccgaccctcaatgatagtcgttatgccttgatagagtttagtatgaacactccttatcgcgatattcatagcgccttgagcaagatcttgatgttgggaattactccagtcattgcccacattgagcgctatgatgctcttgaaaataatgaaaaacgcgttcgagaactgatcgatatgggctgttacacgcaagtaaatagttcacatgtcctcaaacccaaactttttggcgaacgttataaattcatgaaaaaaagagctcagtattttttagagcaggatttggttcatgtcattgcaagtgatatgcacaatctagacggtagacctcctcatatggcagaagcatatgaccttgttacccaaaaatacggagaagcgaaggctcaggaactttttatagacaatcctcgaaaaattgtaatggatcaactaatttaggagaaatgatgaaagaacaaaatacgatagaaatcgatgtatttcaattagttaaaagcttgtggaaacgcaagctaatgattttaatagtggcacttgtgacaggtgcgggggcttttgcatatagcacttttattgttaagccagaatatacgagtaccacgcgaatttacgtagtgaatcgcaatcaaggagacaagccggggttgacaaatcaggatttgcaggcaggaacttatctggtaaaagactaccgtgagattatcctttcgcaggatgttttggaggaagttgtttctgatttgaaactagatttgacgccaaaaggtttggctaataaaattaaagtgacagtaccagttgatacccgtattgtctctatttcagttaatgatcgagttcctgaagaggcaagccgtatcgctaactctttgagagaagtagctgctcaaaaaattatcagtattactcgtgtttctgacgtgacaacactggaggaggcaaggccggcgatatccccgtcttcgccaaatattaaacgcaatacactaattggttttttggcaggggtgattggaactagtgttatagttcttcatcttgaacttttggatactcgtgtgaaacgtccggaagatatcgaaaatacattgcagatgacacttttgggagttgtgccaaacttgggtaagttgaaataggagagaaggatgccgacattagaaatagcacaaaaaaaactggagttcattaagaaggcagaagaatattacaatgccttgtgtacaaatatacagttgagcggagataaactaaaagtaatttccgttacttctgttaaccctggggaaggaaaaacaactacttccataaatatagcatggtcgtttgcgcgtgcaggctataaaactcttttgatcgatggcgatactcgaaattcagttatgttaggagtttttaaatctcgtgaaaaaattacagggctaacagaatttttatctgggacagctgatttatctcacggtttatgtgatacaaatattgaaaatttatttgtagttcaatcgggatctgtatcaccaaaccctacagccttgttacaaagtaaaaattttaatgatatgattgaaacattgcgtaaatattttgattatatcattattgatacaccgcctattggaattgttattgatgcggcaattatcactcaaaagtgtgatgcgtccatcttggtaacagcaacaggtgaggcgaataaacgtgatatccaaaaagcgaaacaacaattaaaacaaacagggaaactgttcctaggagttgttttaaataaattggatatctcggttaataagtatggagtttacggttcctatggaaattatggtaaaaaataaaatgaatatagtatggaaggggactacaatataactctggcattcttacagagcatacttatcagtttattagcttatgtactgattgcaatttcagaaaccgatatgtcttcaaataatattcggtctatttggaagaataattgaactggaccttctaattcattattgagaactcatatattactgaaacaaataaattttgtttagatggagaaaagttttatctgacgtagaggataaaagaattatatttctgaaaatcattgagtgaccaaatatatattgagtttctgtagttgcatgtactgcctgatttaatttgtcaaatggaaatagaatgaaaaatggaaatagaatttatagttggaggttgtttatgtacggtataataaaacgattaggtgatatattattatctttaatagggataataatattgtgtccggtttttatgataattgcaattgcgattaaacttgattcagaaggtccggttatatttaagcaaaaacgctttggtattcataaagaatacttctatattttgaaatttaggtctatgaaaatagatgcacctaaaaatgtggcgcctcgaaacttatataatccagagcaatggattacaaaagtaggggctttcttgcgaaaaacatctttggatgaactaccacaattgtttaatattcttgttggtaatatgagtattgtaggtcctagaccagcgggtataaatgaactagatttgattgcagagagagataagtatggagcaaatgatatcttgccagggttaactggatgggcacaaattaacgggcgtgatactttgtctgttgagatgaagacggagttagatggctactatgttaaacatctgtctttgataatggatattagatgtatagttaagacaataccttacgtactgaaacgaaaaggtattgtagagggtagtggtaagaaagaaagttaaattggacaatgaaaatactatttgtttgccaacattataagccagaaccattcaggttgtcagatatttgtgaagatttagttcgaaaagggcatgaagtctctgttttggctgggattcctaattaccctgaagggaagatatatgcagattatcgtcataataaaaaaagacgtgagattatagaaggtgttacgatatatcgttcttatacaatccctagaaaaaaaagtgttgtatttcgattgttgaattattttagctttgcaattagttctactttaggagttttattggggaggtataaaacgaaagatggatcgaattttgactgtgtattcgttaaccaattgtctccagttatgatggcatgggctggtatggcttataaaaaaaaatataagaaaccgatgtttctatattgtatggatgtttggccagatagtttaaccgtaggtggagtgaaacaagatggcttgattttcaagctgtttaaatttatctcaaaaaaagtttaccgagctagtgattatatatttgtcactagtccatcatttaaaaattattttgtgaagcaatttgacatatccgaacaaaagattacatatttgccacaatatgcagaagatctttttatccctgatgaatctatagttaataaagaaagtgttgacctaacttttgctggtaatattggcaaagcacaaaatttggaaactattttgaaagctgccagtttgatagagaagaataccaatttacccaagaaaattcattttcattttgttggagatggtacggaattgttaagcatgaaagcattagctcatgaattggagttaaagaatatttccttctatggaagacgttctttggaggaaatgccatccttctataaaaaatcagatgctatgttagtttctttaataggagactcgatagtttctcgtactatacctgggaaggtacaatcttatatggcggcaggcaaaccaattataggtgcaatttcaggagatgctaaaataattgtagaagaagcaaattgtggatatgttagtcccgaacgagatgtaaaacaattggcaaaaaatatttgtaaatttagtatgttatctattaagagacaaagagagttaggaaagaaagctcgttgttactatgaaaatcacttttcaaaagagcagtttatgctcgaactggagacatgtttagagagggaaagtaagaaagaataatttaatgagagtactgtttatactatctgataatatatatctaactccttacttcaatttttataaagaattattgaagaaactgtctattagttacgatgttatatattgggataagaatattaacgagattattacaaaacaaaactactatcgtatttctttttctggtaaaggaaaattaagtaagatattaggttatgtaaaattcagaaaagaaattaaaaagaagctaaaagaaaatgattatgatatgatattgccgttacatagtattgtgtctttcattttagtagattttcttctcttttcatttaaaaatagatatatttatgatattcgtgattacagttatgaaaaatttttggtttatcgtttggttcagaaacaattggtgaaaaattctttaatgaatatcgtttcttcagacggctataaattttttttaccaatgggagagtattttactacccataacctacccaatatgatagaattaaacgaggtaaagcagttaaaaaataatagtacgtttccaattcaactttcctacattggtttaattcgttttcaagaacaaaataaaaaaataatcgatttttttgcaaatgacagtcgatttcagttgaattttataggtactaatgcaggagaattaagggaattttgtcaagaaaaaaatatcagcaatgttaacttggtggacacattccagcctaaagataccatgtctttttataagaatacagatgttgttttgaatttatacgggaatcacactcccttactagactatgctttgtctaataaactctactttgctgcattgttgtataaacctattttagtttgtgaagatacttatatggaaaaagtgtcaatagagaatggttttggtttcgttttacctatgaaggatgaatcggaaaaagattgtttggctttgtatattcaaaaccttgacaggaaacagctaattaagaattgtgataacttcatggacagaattagtttagaaaaacaaaaaacagaaatagaattagagaagcgaatcttaagcttaaggaagaagaatgattaaagtattacatctatttacaacactagatagtggtggagtagaaagttttctattcaactattattctcacattgatagaaaaaaaattcaatttgattttattgtgcctggaaaagaacaaggatttttagaggataaaatgaaagaattgggtgcaaaggtttatcatgtgcctctattaaggaaaaagcctctacatcagtttctctctcttgctagaataataaagaaaggagattatgatatagttcattgccatggctataaatctgcaattggtctgatcttatctaaaataattggttgtaaaattagaattattcatagtcatatggcttatgtaacagaaaacagttttcaaaaagtattgcgtaaattagtaacaattttggtaaaaatcttagcaactcattggtttgcatgtggggaagattcggctaagtggttatatggagagaaagcgtataaagacggaaaaattgaaattatttttaatgcaattgatttgaaaaagtatcaatttttgtcagatgttagagaaaaatgtcgtagagaattagatgtgtcaaataagttcgtattaggaaatatagctcgcctatcagatcaaaaaaaccaaagttatttatttaacgttttaaaagaactcattttaatcaaaccaaatgttattttactcctagttggtaatggtgaggatgagcagaaattaaaacagaaagctttagaactaaatctgaccccatatgtgctatttttagggagaaggactgatatttctgatttattatctgcgatggatgtttttttgcttccgtctaaatatgaggggttgcctgtttctctagtagaggctcaggcatcgggattacaaattttatcgtcagatacagtgacgcaagaagtagatgtgaccaaaaacattagttacttacctatcaacgaagagtctgtgttgctatggaaagataaagtactgtctttaacatctgaggaatgcaatcgttttgaaataaataacagtatgacagatggactctatgatatttgttatcaagctagtaaattattgaatcgttatcaagaaatgtgtgtaataaaggagatatagatgcagacaaagtatatttgtagagtgacactagtgacattaagttttatatttgctttctgttacttgttctggactctcgataattggaataatggttttcttatatctaattatgttccgtctatatttatatgggtttgctttctaattatttttcaaattactggttttattttacaaaaagttagtatatatgatttttctgtatggtatctgattttatcttatttttttatgtttggattaattttcaatgagtatatggggtttcaaacaactctgctgtggagccctagtaacttctataataatgaagaattatttcattcatatatttttataatttggattttgttttgttattctgtaggctatttatttttttatagtgatggaaaggtacattatcattcagaagtacaaaattatcaggaaaatgaagagaaaattttgtacaatgcgggtaggattttaacaggagtgggctttatttctagggtaataactgattctaaaacagtactagcagttagagcggcgaatagctattcagcatattcagaggcagctagttcaggaataatagatgatttaggagtacttatgcttcctggtgtgttctccttgttttattcagataagctgtcccgagttataaagcgtactattttttgggtaatgttgttttacctaattttgataatgatcctaacaggaagtcgtaaaatccaggtgttttcaatcttggcgttggttttagtatacacacaatctttagggattactttttcgaagaaaagagtacttgtatttttaatagtaactgtatttctattaaatgtattagttgttattagggggcaccgtttcgacttgaatactataggtatatacttatttgattccttttcttcattagattttgtaaagaatatactaggggaagtattttcagagtcgggactgaccagcctaacagtagcttctgctgtaactgttgtgcctagtagcattccatatgaatatgggatgacatttctacgcactatcctatcaatttttcctattggatggttagttggtgatttttttgataaagcatcagcgacggttgttattaataaatttttggggttacctgtaggctcttcttttgtggaagaattattttggaactttggttactatggtggtgttttttggagttttgttttgggaatatttagtggatggcgattaaatttcagagcttttcaaacaagtaaaatctcaaaagttatttatttttcggtaatttctcaactattgcttttagtgagaagtagttcaatagatgtttatcgtcctattatgtatagtttgattatgatatttatttttaggaggttgaaaaaatagtggtgaaaaaaattatgttacatggtgcaacggattatggttcaagtaattacggtgattatctttacggtgagattgtctatgatttattagaatctaaaggatatgaagtttctttttataatccatcagatttctttcaaatgtacttgaaagaatatcgccaaaaacaaagttttactaaaaaacaagcagatgctattttgtatatcccgggaggatattttggggaagggcataatgcacgttttcgtgataatttaatccaatttaaacgatttttacctttgggaatttgggcttcatattttaaaaagcctataggagtattaggtattggtgcagggcctaataacgattctttgatgaattatggtataaagagaattattaatcatgctcaatttattacagttcgtgatcgagaatcatttgattctttgaagcatttgtcgccttcggctccagtgcatgaaacctttgatttaattatttcaagtaaattaagagaagaaaaaacagagcagctgtgtcaattgaaaagagaagctaaagataagaagataattcttgttcactataatcattccaaaaaagctcttgaaaaatttgcggaatcaattagtctttttctagaaaacaatcctaactattatgttgtagtaacttcggattccattctaccttatgaagatgcttattatcaggaatttagaaaattagttagaactgaggattgttttcaattcaagtatcattctcctgcagaaatgacatcattgttgaaaatggtagatgtggttttaacttgtaaattacatgttggggtagtggcaacatgttttaataaatctgtgattgccattgcatgccatccagaaaaaacagcacgttattatggagcaattggagagttacaacgttgtgaatctttatttgattcaagtgttaatagtattgtaaagaaacttgaaacttttcatctaaaaccgataacaataccttcagaattggtgttgaaagcgagaagtagtttggactatttagatctttttttggaaggactagttcgtgaaagttgatagaatttcatttataaaaaatacaagttctctctatattctgaatattgttaaattactatttcctttattaacactcccgtatttgacaagggtgctttcgctagacgcgtatggaatggttatttatgttaaagcgttaatagcttatgttcaactggtgattgattttggtttcatgatatcagctacaaaaaatattgtaaatgcttgtactactccctcaaagattggaaggatagttggagatactctagttgaaaaaatatttttatctatcatttcgattctaatttacaccatattgatgtggcaaatcccaataatgagagagaatattcttttttcagttttttatttgttagctacagtgaccaatatttttatctttgactttttatttcgtggaattgaaaagatgcatgcagttgcaattccttatattatttctaaaactatcattacaattttgacatttattgtagtaaaagatgattcttctattttatggattcctatattggaaggaattgggaatttagttgctgcagtagtttcttatagattccttcattattatggaattaaattatcattttcttatctgtctgtttgggttaaagatttaaaggaatcctctatttattttttatccaattttgcaactactatttttggcgtctttacgacagtcatttcgggtttttatttacaaagtcaagagatagccttttgggggatagcaatgcaactgctttcagcagcaaaatcattgtataatcctatagcgaatagtttatatccgcatatgatacgtactaaagatatacaatcggttaagagtattaatcggattatgtttattcctattatctttggagttttgatagttttattcttttcaaatcaaattctttctataattggtggtgaaaaatataccgtttcagcagattttcttaagtacttattacccgcttttgttgctagtttttattctatgatttacggatggcctgtcttaggagctattgataaagtgaaagaaactacaatgacaactatattagcttcgattgtccaaactttgggattaggaatatttatcttgtctgataattttagtttagtaacattagctatttgttcaagtatgtctgaggtggtgttatggattagccgttatctaatttattttaagaaccgttcattatttgttaggagtaagtaaatatatgaaaaaagtagttgtagtatttggaactcgtccagaagccatcaagatgtgtcctttggtcaaagagttaagaacacgtaagaatattgaaacattagtttgcgttacgggccaacaccgtcaaatgttggatcaggtcttggacacatttgggattattcccgattttgatttgtctattatgaaagataaacaaactttatttgatgtgaccattggcattttggaaggaatgaaggctattttagagtcagaaaaacctgatttggtgttagttcatggggatacaagtacgaccttcgctagttcactggcggccttttatttacagattccaattggtcatgttgaagctggtttgcgcacttacgatatctattcaccatatcctgaagagtttaatcgtcaagcagttggggttttggctcagtatcattttacaccaacacaactttcaaaagataatcttttaagagaaggaaaaactccagagagcatatttgtgacaggtaatacggcgattgatgctttacaaactacaattcaagaggactatacgcatcctgagttagaatggataggagaaagcaggtttattctaattacagctcatcgtcgtgaaaatcttggtgaaccgatgagacatatgtttagagcaattagaaggattattgaagaatattcagatgtcaaggctatttatcctatccatatgaatcctcgtgttcgccaaattgctgaggaagaactaagtggctgtgaacgtatcaagatgatcgaacctttagaagtattagattttcacaattttttatcaagaagttatttaattttaacagatagtggtggtattcaggaagaggctccaagtttaggaaaacctgttttggttatgagagatacaactgaacgtccagagggaattgaagcagggactttgaaacttgtaggtgctgatgaaaataatatttataggcattttaaagaattattagaaaatgattcagtttatcaagcaatgagtcaagcttcaaatccatatggagatggaacggcttgtaagaaaattgcagacatactagaaggagaagtgtaatatatgtcacaatttacaggaaaaactctcctaattacaggagggacaggttcatttgggaatgcggttctcaagcgttttttagaaacagatgtctcagagattcgtatattttcgcgagatgaaaagaaacaagatgatatgcgtcatgagtttcaggtaaaagtaccagaagtggctgggaaaatccgtttttaccttggagatgtgcgtgacttagcttcggtaaaaaatgctatgcatggtgtggattatgtttttcacgctgctgctcttaaacaagtaccttcttgtgaatttttccctgtagaagcggtaaaaactaacattttgggaacggagaatgtcctcactgcggctatcgaagctggtgtaaagcaagttatctgtctttctacagataaggcggcttatcctgtcaatgctatgggaacatccaaggctatgatggaaaagattgctgttgctaagtccaggacggtaaatcctgagcatacaaagatatgtgtgactcgctatgggaatgttctgtgtagccgtggatctgtcgttcctctttggattgagcaaattaagcaaggaaatgctcttacaattactgaacctagcatgacacgttttgtgatgacattggaagaagcagtagacttggttttatttgcatttgaagaagggaaatctggagatatactagttcagaaagcaccagcatgtacgattgaagtgttggctaaggctgtatcagaaatttttgcctcagaacaagatattaagattataggtattagacacggagaaaaaaggtatgaaacactattaactaacgaagagtgcgcaaatgcaattgatttgggtgatttttatagagttcctagtgataatcgtaatcttaactatgataagtatttcaaagatggtagtacgaatagaaatttgttgacagaattcaatagtaataataccgatttgatggatgtagagcaagttaaaagaaagttgctagaattagatgaaatacagacagcaattcgtgatatggtagcagacgaagagatgtaaaatcttttaagatacattaaaattatcaaggatatataatgtatcatgtattgtcgagagagttaactattaaaacagcatataaaataaggagggggcatgattaaaaatattttaatcacaggagcgaaaggatttgtaggaaaaaatcttatctgtactctggaagctttgaaagatggacgagataggactcgtcctaatttagagattggagagatttttcagtatgatcgtgatacagatccgattttattagatgaatattgtaagaaggccgatttcgtattccatttagctggtgtcaatcgtccacagaatcctgatgaattcatggagggaaattacggtttttcaagtagattattggagattttagaaaagtatgaaaacacttgtcctgttctactctcaagttctactcaagctagtttagaaggccgattttcaaactctatatatggacaatctaagctagcaggggaagaactcttctttgaatatggaaagaaaacgggagcacctgtcttagtttaccgtttcccgaatctttatgggaagtggtgccgtcctaactacaattctgctgtagcaactttctgttataatctagctcacgatttacctattcaagtaaatgatccaagtgtagaattggagttgctgtatattgatgatttgatacaagagtgtctaactgcattggaaggaaatcctcatcgttgtaatctagatggattacaaatcttacctagcccatcaggaaactactgctacgtaccaacgactcatcgtgcaaccttaggagagattgtctctctattagaaacatttaaaaaacagcctgatagtttagttatgcctgaaattcctcagggatcgtttaaaaagaaattgtattctacctacctatcttatttaccagtagataagtttaagtttcctctaaaaatgaatatagatgaacgaggtagttttacggaattattaaaaacagaaaatacgggtcaattttctgttaatatttctaaacctggcattaccaaagggcaacattggcatcattctaagtgggaatttttcatggttgtttctggtcgtgctttaatacaagagcgtaggatagggctggatgaaaacggtcaagagtatcctattctgaactttgaagtgtcgggcgataagattgaagcaatacatatgataccgggctatgcacataatattattaatctttctgatacagaaaatctaattactgtcatgtgggctaatgagtcatttgatcctagacatccagatactttttttgaacaagtggagaaataaatgaaaattaagacagattatagtgatattcactttaaagataatggcaaacttaagttattgattattgtgggaacacgtccagagattatacgtctaagtagtgttatcactaaatgtcgaaagtattttgatgttattttggcacatactggacaaaactatgattacaatttaaatggtattttctttgataatttagggttagacactccggacgtatacatggatgctgttggagatgatcttggtgctactgtagggaatattattaatacttcatacaaattgatgaatcaaattaaaccagatgctttattgattttaggggatacaaattcttgtttatcagctattgctgccaagcgtttacatattccaatttttcatatggaggctggcaatcgctgtaaagatgagtgcctaccggaagagactaatcgtcggattgttgatgttatttcagatgttaacttagcatactctgaacatgcacgtaagtatttacatgagtgtggtttacctaaagagcgcacatatgtaactggttctcctatggcagaagtgttacataaaaatttatctgctattgagtcttcagatatccatgaacgtttgggattgaaaaaaggaggttatatcttactttcagctcaccgtgaggaaaatattgatacagataaaaattttatttctctctttacagcaattaatcaattagctgaaaagtataatatgccaatcttatattcttgccatcctagatcaaagaaaaggctacaagagagcggttttaaactagataaacgtgtgattcagcatgagccactaggattccatgactataattgtttacagatgaatgcatttgttgtagtatctgattcgggaactttaccggaagaaagtagtttctttactagtcaaggttatccttttcccgctgtatgtattcgtacaagtacagaacgtcctgagtccttagataaggcaggatttattttggcaggcattgatgaaaattctcttcttcaagcagttgaaactgctgttagcttggcacaagatgaggattttggattaccggttccggattatgttgaggaaaatgtctctactaaagttgttaagataatacagagctatacagggatagtggataaaatagtttggaggaaaagctgaattgtatatttttaataaatcaaaacgagatgattaattcttagtagaacaagagtaaaattgaacgtatttgatggaaatgtcttacttgatagtcgagggatagccattctatcggatttttggcttgtttttgcgcttcatgtttgatagaataaagggctctttgtcaactgtagtgggttgaagaaaagctaagcttgagaaaggacaaatttcgtcctttcttttttgatgttcagagcgataaaaatccgttttttgaagttttcaaagtttcgaaagtaaccgcccaataacgaagtctattgaaaaatctccagactagagaactcatatatagttcctaatctggagatttcttatttgcacttttcttgtacaactttagtccacggtaaataggcctctaaaacctctttgtttacgagagtttcctcgtttggaagacattctagaagataggatagatatttctcgctatttataatggattgtaataagatatgaacaaatcgattaggaaaggaaaattgatttatagaaatattttagcagtcgatgcgtactgttatagattcaacgcactataattgatgacgtttagctgtttccaacaaactcataataatagctcttgctttagctccttcaaaactttgagaaaataaccaccctcgcttttttaaaaataaccaccctcgtttttttaaactgagcttaggctaaaagagtccactggactcttttactccgtcccataaccaatgatttaatggcgcgttcagctagattattggaaaggaccagatgtccgtcttttaaaatggtcttaaaggtttcttcatacttgaggctgtattcaattgcccttcctagttttgaacccgataaaactgactgacgacggcaccaagcaaagaagtcttccagtaggggttggagatgttcttgacgtttctgtagccgttcatcagctggcaaagcctcccagtctctttccaaggaaaataactgatcacaataggctaaacctttagctcctaaggatgatttatctgcttgcttggggggcacttcaaaaaacttccttctcacatgcgcccaacatccaacaagtgcagcttcttccagttgacgataagcttctagctgttcgcagtttaccaagcttagcgtcgccttactcctaaaccttggactgctatcgcataggcagaactagaggactaaagtcctaagttactgccgcaacatatcacaatgaacatagccagaataatctcctaggaattcttgtactactgaaccacttcgacactgatcatggtggtaaagcgtaatcccttgtttctctgctttacctgacaaaaaagtccaatagtaggtcagatggctatcactctctagaacccgataggaggtttcatccgcatgaagtaagggctgagtcaatagtctctctcgcaagaggttataaaggggctttaggaataggagctttcacaagcttatccagatgattatcttttactcgttatggacaatgctatatggcataaatcaagtaccttaaagattccgactaatattggctttgcatttattcctccatacacaccagagatgaaccccattgaacaagtgtggaaagagattcgtaaacgtggatttaagaataaagcctttcgaactttggaagatgtcatgaatcaacttcaagatgttatacaaggactggagaaggaggtgataaagtccatcgttaatcggagatggactagagtgctttttgaaagcagatgagtataaaaagaaagtcctcatttcaatagaaatcacgactttctgatggatttatagtaaaatgaaataataacaggacaaatcgatcaggacagtaaaatcgatttctaacaatgttttagaagcagaggtgtactattctagtttcaatctactatatttttggagtgatagaaaagcctttcatcagccaatctacttgttcaggtgcgagagctttgacatccttttctgtactgggccaagtcagtctgccgttctcaaagcgtttatatagtagccaaaatccttgaccatcccagtaaaggactttaaagcggtctttacgtccaccacaaaagagaaagatttgaccggagaaaggatccaattcaaagtgggttttaacgagataagccagtgaatcgattccttgtctcatatcagttttcccacacacgagatagacctgccctaggctagatagatgaattgtcatagagcaacaccttatccaaaagctgttctatcatttcgagattgagagattgaaaaaaacttacttcaagcttgccaatacgaattttaagtagaatatcatttctctttttagaatcaaaacgacgagattgtggaatctctacaggaacaataggttgtggcattaaaatatcctccaatatttactttactaatagtatacaggaggagctccatgaatgatagataccttgttatgacgcgcttacgatattcatattttttgcaaagatgttgtttgaaaaataattttcaaaaattctgaaaattctgttgacaactttctgaaaagagtctataatggagagaaagttttaaaggagaaaatgatgaaaagttcaaaactatttgcccttgcgggcgtgacattattggcggcgactactttagctgcatgctctggatcaggttcaagcactaaaggtgagaagacattctcatacatttatgagacagaccctgataacctcaactatttgacaactgctaaggctgcgacacaaatattaccagtaacgtggttgatggtttgctagaaaatgatcgctacgggaactttgtgccgtctatggctgaggattggtctgtatccaaggatggattgacttacacttatactatccgtaaggatgcaaaatggtatacttctgaaggtgaagaatacgcggcagtcaaagctcaagactttgtaacaggattaaaatatgctgctgataaaaaatcagatgctctttaccttgttcaagaatcaatcaaagggttggatgcctatgtaaaaggggaaatcaaagatttctcacaagtaggaattaaggctctggatgaacagacagttcagtacactttgaacaaaccagaaagcttctggaattctaagacaaccatgggtgtgcttgcgccagttaatgaagagtttttgaattcaaaaggagatgattttgccaaagctacggatccaagtagtctcttgtataacggtccttatttgttgaaatccattgtgaccaaatcctctgttgaatttgcgaaaaatccgaactactgggataaggacaatgtgcatgttgacaaagttaaattgtcattctgggatggtcaagataccagcaaacctgcagaaaactttaaagatggtagccttacagcagctcgtctctatccaacaagtgcaagtttcgcagaacttgagaagagtatgaaggacaatattgtctatactcaacaagactctattacgtatctagttggtacaaatattgaccgtcagtcctataaatacacatctaagaccagcgacgaacaaaaggcatcgactaaaaaggctctcttaaacaaggatttccgtcaggctattgcctttggatttgaccgtacagcctatgcctctcagttgaatggacaaactggagcaagtaaaatcttgcgtaatctctttgtgccaccaacatttgttcaagcagatggtaaaaactttggcgatatggtcaaagagaaattggtcacttatggggatgaatggaaggatgttaatcttgcagattctcaggatggtctttacaatccagaaaaagccaaggctgaatttgctaaagctaaatcagccttacaagcagaaggagtccaattcccaattcatttggatatgccagttgaccaaacagcaactacaaaagttcagcgcgtccaatctatgaaacaatccttggaagcaactttaggagctgataatgtcattattgatattcaacaactacaaaaagacgaagtaaacaatattacatattttgctgaaaatgctgctggcgaagactgggatttatcagataatgtcggttggggtccagactttgccgatccatcaacctaccttgatattatcaaaccttctgtaggagaaagtactaaaacatatttagggtttgactcaggggaagataatgtagctgctaaaaaagtaggtctatatgactacgaaaaattggttactgaggctggtgatgagactacagatgttgctaaacgctatgataaatacgctgcagcccaagcttggttgacagatagtgctttgattattccaactacatctcgtacagggcgtccaatcttgtctaagatggtaccatttacaataccatttgcattgtcaggaaataaaggtacaagtgaaccagtcttgtataaatacttggaacttcaagacaaggcagtcactgtagatgaataccaaaaagctcaggaaaaatggatgaaagaaaaagaagagtctaataaaaaggctcaagaagatctcgcaaaacatgtgaaataactgttgcaaaatataagaaaggatttagtatttcccttgaatgctgaatccttttttacatttgtaaagaaagattctaaaatgtacggacccccaaaagttggagcctctttttgtcagaatagagaaaatttttgttaattttacttgtttcctattgctttctcagctattatttgttatattaaaagtataattattttttatttatcagagttaagcattgcactttcagaggaaggagtattttttaaaaagaaaatgtaaacgtttgctcaaaaatgaaaggatttagaagtttatgaataaaggattatttgaaaaacgttgtaaatatagtattcggaaattttcattaggtgttgcttctgttatgattggagctgcattctttgggacaagtccggttcttgcagatagcgtgcagtctggttccacggcgaacttaccagctgatttagctactgctcttgcaacagcaaaagagaatgatgggcgtgattttgaagcgcctaaggtgggagaagaccaaggttctccagaagttacagatggacctaagacagaagaagaactattagcacttgaaaaagaaaaaccggctgaagaaaaaccaaaagaggataaacctgcagctgctaaacctgaaacacctaagacggtaacccctgaatggcaaacggtagcgaataaagagcaacagggaacagtcactatccgagaagaaaaaggtgtccgctacaaccaactatcctcaactgctcaaaatgataacgcaggcaaaccagccctgtttgaaaagaagggcttgaccgttgatgccaatggaaatgcaactgttgatttaaccttcaaagatgattctgaaaagggcaaatcacgctttggtgtctttttgaaatttaaagataccaagaataatgtttttgtcggttatgacaaggatggctggttctgggagtataaatctccaacaactagcacttggtatagaggtagtcgtgttgctgctcctgaaacaggatcaacaaaccgtctctctatcactctcaagtcagacggtcagctaaatgccagcaataatgatgtcaatctctttgacacagtgactctaccagctgcggtcaatgaccatcttaaaaatgagaagaagattcttctcaaggcgggctcttatgacgatgagcgaacagttgttagcgttaaaacggataaccaagagggggtaaaaacagaggatacccctgctgaaaaagaaacaggtcctgaagttgatgatagcaaggtgacttatgacacgattcagtctaaggtcctcaaagcagtgattgaccaagccttccctcgtgtcaaggaatacagcttgaacgggcatactttgccaggacaggtgcaacagttcaaccaagtctttatcaataaccaccgaatcacccctgaagtcacttataagaaaatcaatgagacaacagcagagtacttgatgaagcttcgcgatgatgctcacttaatcaatgcggaaatgacagtacgcttgcaagttgtagacaatcaattgcactttgatgtgactaagattgtcaaccacaatcaagtcactccaggtcaaaagattgatgacgaaagcaaactactttcttctattagtttcctcggcaatgctttagtctctgtttctagtaatcaaactggtgctaagtttgatggggcaaccatgtcaaacaatacgcatgtcagcggagatgatcatatcgatgtaaccaatccaatgaaggatttggctaagggttacatgtatggatttgtttctacagataagcttgctgctggtgtttggagtaactctcaaaacagctatggtggtggttcgaatgactggactcgtttgacagcttataaagaaacagtcggaaatgccaactatgtaggaatccacagctctgaatggcaatgggaaaaagcttataagggcattgttttcccagaatacacgaaggaacttccaagtgctaaggttgttatcactgaagatgccaatgcagacaagaacgttgattggcaagatggtgccattgcttatcgtagcattatgaacaatcctcaaggttgggaaaaagttaaggatatcacagcttaccgtatcgcgatgaactttggttctcaagcacaaaacccattccttatgaccttggatggtatcaagaaaatcaatctccatacagatggtcttgggcaaggtgttctccttaaaggatatggtagcgaaggccatgactctggtcacttgaactatgctgatattggtaagcgtatcggtggtgtcgaagacttcaagaccctaattgagaaggctaagaaatatggagctcatctaggtatccacgttaacgcttcagaaacttatcctgagtctaaatacttcaatgaaaaaattctccgtaagaatccagatggaagctatagctatggttggaactggctagatcaaggtatcaacattgatgctgcctatgacctagctcatggtcgtttggcacgttgggaagatttgaagaaaaaacttggtgacggtctcgactttatctatgtggacgtttggggtaatggtcaatcaggtgataacggtgcctgggctacccacgttcttgctaaagaaattaacaaacaaggctggcgctttgcgatcgagtggggccatggtggtgagtacgactctaccttccatcactgggcagctgacttgacctacggtggctacaccaataaaggtatcaacagtgccatcacccgctttatccgtaaccaccaaaaagatgcttgggtaggggactacagaagttatggtggtgcagccaactatccactgctaggtggctacagcatgaaagactttgaaggctggcagggaagaagtgactacaatggctatgtaaccaacttatttgcccatgacgtcatgactaagtacttccaacacttcactgtaagtaaatgggaaaatggtacaccggtgactatgaccgataacggtagcacctataaatggactccagaaatgcgagtggaattggtagatgctgacaataataaagtagttgtaactcgtaagtcaaatgatgtcaatagtccacaatatcgcgaacgtacagtaacgctcaacggacgtgtcatccaagatggttcagcttacttgactccttggaactgggatgcaaatggtaagaaactttctactgataaggaaaagatgtactacttcaatacgcaggccggtgcaacaacttggacccttccaagcgattgggcaaagagcaaggtttacctttacaagctaactgaccaaggtaagacagaagagcaagaactaactgtaaaagatggtaaaattaccctagatcttctagcaaatcaaccatacgttctctatcgttcgaaacaaactaatcctgaaatgtcatggagtgaaggcatgcacatctatgaccaaggatttaatagcggtaccttgaaacattggaccatttcaggcgatgcttctaaggcagaaattgtcaagtctcaaggggcaaacgatatgcttcgtattcaaggaaacaaagaaaaagttagtctcactcagaaattaactggcttgaaaccaaataccaagtatgccgtttatgttggtgtagataaccgtagtaatgccaaggcaagtatcactgtgaatactggtgaaaaagaagtgactacttataccaataagtctctcgcgctcaactatgttaaggcctacgcccacaatacacgtcgtgacaatgctacagttgacgatacaagttacttccaaaacatgtacgccttctttacaactggagcggacgtctcaaatgttactctgacattgagtcgtgaagctggtgatcaagcaacttactttgatgaaattcgtacctttgaaaacaattcaagcatgtacggagacaagcatgatacaggtaaaggcaccttcaagcaagactttgaaaatgttgctcagggtatcttcccatttgtagtgggtggtgtcgaaggtgttgaagataaccgcactcacttgtctgaaaaacacaatccatatacacaacgtggttggaatggtaagaaagtcgatgatgttatcgaaggaaattggtcactcaagacaaatggactagtgagccgtcgtaacttggtttaccaaaccatcccacaaaacttccgttttgaagcaggtaagacctaccgtgtaacctttgaatacgaagcaggatcagacaatacctatgcttttgtagtcggtaagggagaattccagtcaggtcgtcgtggtactcaagcaagcaacttggaaatgcatgaattgccaaatacttggacagattctaagaaagccaagaaggcaaccttccttgtgacaggtgcagaaacaggcgatacttgggtaggtatctactcaactggaaatgcaagtaatactcgtggtgattctggtggaaatgccaacttccgtggttataacgacttcatgatggataatcttcaaatcgaagaaattaccctaacaggtaagatgttgacagaaaatgctctgaagaactacttgccaacggttgccatgactaactacaccaaagagtctatggatgctttgaaagaggcggtctttaacctcagtcaggccgatgatgatatcagtgtggaagaagcgcgtgcagagattgccaagattgaagctttgaagaatgctttggttcagaagaagacggctttggtagcagatgactttgcaagtcttacagctcctgctcaggctcaagaaggtcttgcaaatgcctttgatggcaatgtgtctagtctatggcatacatcttggaatggtggagatgtaggcaagcctgcaactatggtcttgaaagaaccaactgaaatcacaggacttcgctatgttccgcgtggatcaggttcaaatggtaacttgcgagatgtgaaacttgttgtgacagatgagtctggcaaggagcatacctttactgcaactgattggccaaataacaacaaaccaaaagatattgactttggtaagacaatcaaggctaagaaaattgtccttactggtaccaagacatacggagatggtggagataaataccaatctgcagcggaacttatctttactcgtccacaggtagcagaaacacctcttgacttgtcaggctatgaagcagctttggttaaggctcagaaattaacagacaaagacaatcaagaggaagtagctagcgttcaggcaagcatgaaatatgcgacggataaccatctcttgacggaaagaatggtggaatactttgcagattatctcaaccaattaaaagattctgctacgaaaccagatgctccaactgtagagaaacctgagtttaaacttagatctttagcttccgagcaaggtaagacgccagattataagcaagaaatagctagaccagaaacacctgaacaaatcttgccagcaacaggtgagagtcaatctgacacagccctcatcctagcaagtgttagtctagccctatctgctctctttgtagtaaaaacgaagaaagactagtatttagtaaaacctcttaacaagattacggaagcagtctctatcttttccaatgaggtttatagtacagaaaaagcctgagaagatgtcttctcaggcttttgttaagcacataaatacaatagtgctatgacaaaatcacccagaaaaatctgggtgataaatgttatggttgtgctggttgaggattctgattttgttgatcaggggttgtatttgattgttgcgtattattgttaggattggtagtcgtactattatttgtgcttggagtggttgagctagactgtgaagttgaactatctgatgatgagcttgaactttcagttgatgggggttgttgtggagcaggtgagttccacgtagaacgagcaccatttttaaatacgaattctccatttctgtagagcccctctggtatattccaatcttctggattgcttccttcagacaggtaggtcatcatagagcggtaaactttggcagcgaccgtaaggccattgcctacaagtggtgtcagacggttagaatagcctgtccatacagccattgaatatttacgcgtatagccagcaaatagttcatcaggtgctacaaattgagaggtcttgatgtggttttcaatttcctcgtctgtatagttagaggttcctgttttaccagcctgagggagccaagcaagataggcatttcgtccagttccataagtcaagactgttttcatcatgtcggtcatcatataggctgtcgtttccttcatggcacgagttccgacattagagaactctttttcactcccatcactaaagacgactttatggatatacattggtttatagtaagttccaccatttgcaaaggcagcgtaagcagcagccatcttttcactacttgctccatattttttgtctgattcggttgtgttacttgaaatggcatttgagtagtgaatacttgggtagtcgattcctagaccatttaggaaagtcttggcgcggttgagtccgaccttgtttagagtttccacggctgggacgtttcgcgattgttgcagggcgtattgcaaggtgatgttgccaaagtagcccctatcccagttataaacaggagtatttgtcccagggtagttatagggctcatcgtgaacgatagtagcagttgaatcgtagacaccgtactccaaggcaggagcatagtctgtgatcggtttcatagttgatccccagtcgcggtttgtttctactgcttggttaattccgaaggaaacattacttgactgatggcgtgctcctagctgggcaatgactttaccgttagaaacatcaacaatggtagaagcgacttgcaattcatcgtctggataggcaacgtattcgtctgtattgtaaatatcccacagatgtttttgagcttcttggtctacatttgtgtagacatccatcccagttgtgagtaggttatagcctgtttcttcttcaacttgattgatgacttccttgaggtaattatccatgtaagcagggtaattacttgctgatttgagactttgtagtccatcagtaattggtgtattgactgctttctcatactgttcagcagagatgtagccttgatttttcatttcagataagaccaagtttcggcggtcttgggctgcttctggatgtgaataggggtcatattggtttggtgcctgaggcattccagccagcaaggctaactgaggtaaacttaaattattgaggtctttaccatagtagttttgagctgctgtctgcattccatagttcccattagacatgtagaccttatttatatagtaggtcaagatttcttgcttggttgctttttgttctaactgaatcgctaaccaagcttcctgagccttacgagaaatagtctggtcggaagtcgaagttgaaaagtaagtcaacttaatcaactgttgggtgagagttgatccaccttggagggaattgctttgcagattgcgcaagaaagctcccaggatacggatggtatcaatccccctgtggtcgaagaagcgatggtcttcgatagaaacgattgccttaaccaaatctgtgggaatatcattagcttgggcattgacgcggcgttcagaacccaagtcagcaatgagttgatttttattgtcgtagattttactagaagttgttgcaactagtttactctcggataggctaggagccttgctaacgtagtagaaaaaaactcctccgcctaagacaatggctgcgataaccaagcttaagaagctaatgctcagatacttgattaggcgcagaatcgttggtttgttcatcttgttttaccacctaataaatgttctttgataacattgagataaggaatttgagggaaggcaccagccttgatttcatatccatattctcgaatatattcaagtggcattgatttttgtcccttatcttgatgatagaagcgaatcaaatcgaatgccggcaataagtaggtttcttgctgagaagaaaagtgaagaaggacaaagcagattccttgttgggcaaggacttgttccatatgctgaatctgatgtggatgaaaatttttcatcggaatcgcacgtttttgttttgtttccttgacttcaaagtcgatgtaatatccattataaacgccagaatagtccgtcgttgaagcttgtcgaaaataggcttcaacaatcttggcacgacttcgttgtggatagtccacttgtacgatttgaataggagttggtttcttatgtataacagccaagccctgagacaaatagtagtcgttggtagcattgatcatcttttcaaaagacattcctcgatttgcgaaatttttgggttgagaaagagatgtttgtcttttttgtgatgaaactttatgtggatagttgaccataattctccttattggtacaataacatcactttattataccataatttgcacagaaagggttaaaaatggctacagctttggttttaggctattctgcttttgatttgggtttattttctgataaggatcctcgtcttaaattgattaaaaaagcgatacgtaaagatttagaggctatggcagcagatggggtgtcttggcttgtgtttacagggagtttgggttttgaatattgggttttagaggttgctcaggagatgaaaactgaatacggtttccagttggccaccatttttgcttttgaaacccatggggaaaattggaatgaaggcaatcagatgaaactgagtcgctttaagcaggtagactttgtcaaatatgcctatcctcgctatgaacacaaggggcagttaagagattaccagcagtttttgctggaaaacacgactagttcctatcttttttatgatgaagaaaatgaaacaaaactagcttatttttaccaaaagatgaaaaatcaagaggactattttataaagagattaacatttgatgaattaaatgaacttgctgaaaatttttccgaaaattgaagctttgaccttgatttttgtttgcctttttttatataataatactagcaagcgagaatggagagagacatggcaagtattattttttcagcgaaagatatttttgaacaagagtttggacgtgaggtccgtggctataataaagtagaagttgacgagtttttagacgatgtcatcaaggactatgaaacctatgctgccttggtcaagtcacttcgtcaggaaattgcggatttgaaggaagaattaactcgtaaaccgaaaccttcaccagttcaagcagaaccccttgaagcggcaattacaagttctatgacgaattttgatattttgaaacgcctgaatagattggaaaaagaagtttttggtaaacaaattttagataactcagatttttaagtagttatttgagatgtgcaatttttggataatcgcgtgaggagaattgtttctcatgaggaaagtccatgctagcacaggctgtgatgcctgtagtgtttgtgctaggcgaaaccataagcctagggacgagaaatcgttacggcagttgaaatggctaagtccttggataggccagagtaggcttgaaagtgccacagtgacggagtctttctggaaacagagagagtggaacgcggtaaacccctcaagctagcaacccaaattttggtcggggcatggagtacgcggaaacgaacgtagtattctgactgctatcagctagagctgttagtggtagacagatgattatcgaaggaagtggtcctagtcacttctggaacaaaacatggcttatagaaaattgcatataggttggggctgagaaattttctcaacctcattttttaaagtggacatatagaaaggtcttgcaagactgtaacatgaaaaaagaatttaatttaattgcaactgtggcagcagggcttgaggctgtcgttggtcgtgaagtgcgagagttgggctacgattgtcaggttgaaaatggacgtgttcgttttcaaggagacgtgagagctattatcgaaaccaacctttggcttcgggcagcagatcgtatcaaaattatcgtaggaacgttcccagctaagacttttgaagagctatttcagggagttttcgctttggattgggaaaattatttaccacttggagctcggttcccgatttcaaaagctaaatgtgttaagtccaaacttcacaatgagcccagtgttcaggctatttctaagaaagctgttgtcaagaaattgcagaaacactatgctcgcccagaaggggttcctctgatggagaatggcccagagtttaagattgaggtctctattctcaaagatgtggcaactgtcatgattgatacgaccgggtctagcctctttaaacgtggttatcgtaccgaaaaaggtggcgctcctatcaaggaaaatatggcagcagccattttacaactttctaactggtatccagacaagcctttgattgatccgacctgtggttcggggactttctgtattgaggcagttatgattgctagaaagatggcgccaggtcttcgtcgctcttttgcatttgaggaatggaactggatcagcgatcgcttgattcaagaagtgcgcacagaagcggctaaaaaagtagaccgtgagcttgagctggatatcatgggctgtgatattgatgctcgcatggtggaaattgctaaggccaatgctcaggtagctggtgttgcaggagacattacttttaagcagatgcgcgtgcaggatttacgttccgataaaatcaatggagtaatcatttccaatccgccttatggtgaacgtttgtcagatgatgcaggggtgaccaagctctatgctgagatggggcaagtatttgcaccgctgaaaacttggagcaaatttatcctgactagtgatgaagcttttgaaagcaagtatggtagccaagcagataagaagcgtaagttatacaacggaaccttgaaagtggatctatatcaatattttggtcagcgtgtcaaacggcaagaggtaaaatagaaagggatactcatgagtaaaaaaagacgaaatcgtcataaaaaagaaggtcaagaaccgcaatttgattttgatgaagcaaaagagctaacagttggtcaagctattcgtaaaaatgaagaagtggaatcaggagtcttgcctgaggattccattttggacaagtatgttaagcaacacagagatgaaattgaggcggataagtttgcgactcgtcaatacaaaaaagaggagttcgttgaaactcagagtctggatgatttaattcaagagatgcgtgaggctgtagagaagtcagaagcttcttcggaggaagttccatcttctgaagacatcttactacccttgcctctggacgatgaggagcaaggcttggatcctctattgctagatgatgaaaatccaacagaaatgactgaagaagtggaagaggagcaaaacctttctcgtctggatcaagaggactcagaaaagaaaagtaaaaaaggctttattttgaccgttttggcgcttgtatcagtaattatttgtgtcagtgcttattatgtctaccgtcaagtggctcgttcgactaaggaaattgaaacttctcaatcaactacagccaatcaatcggatgtggatgattttaatacactttatgacgccttttacacagatagcaataaaacggctttgaaaaatagccagtttgataaactgagtcaactcaagactttacttgataagctggaaggtagtcgtgaacatacgcttgccaaatctaaatatgatagtctagcaacgcaaatcaaggctattcaagatgtcaatgctcaatttgagaaaccagctattgtggatggtgtgttggataccaatgccaaagccaaatcggatgctaaatttacggatattaaaactggaaatacggagcttgataaagtgctagataaggctatcagtcttggtaagagccagcaaacaagtacttctagctcaagttcaagtcaaactagcagctcaagttcaagtcaagcaagttcaaatacgactagtgagccaaaaccaagtagttcaaatgagactagaagtagtcgcagtgaagtcaatatgggtctctcgagtgcaggggttgctgttcaaagaagtgccagtcgtgttgcctataatcagtctgctattgatgatagtaataactctgcctgggattttgcggatggtgtcttggaacaaattctagcgacttcacgttcacgtggctatatcactggagaccaatatatccttgaacgtgtcaatatcgttaacggcaatggttattacaacctctacaagccagatggaacctatctctttacccttaactgtaagacaggctactttgtcggaaatggcgctggtcatgcggatgacttagattactaagcagtcgttacaaaattctttcttttcaaaagtaaaaatgataaaataaaacaaatgaaacaagaggagtgtcaaatgacaaaagctaactttggtgtcgtaggtatggccgtaatgggtcgtaaccttgcccttaatattgaatctcgtggttacacagttgctatctacaaccgtagtaaagaaaaaacggaagatgtgattgcttgccatcctgaaaagaactttgtaccaagctatgacgttgaaagttttgtaaactcaatcgaaaaacctcgtcgtatcatgctgatggttcaagctggacctggtacagatgctactatccaagcccttcttccacaccttgacaagggtgatatcttgattgacggaggaaatactttctacaaagataccatccgtcgtaatgaagaattggcaaactctggtatcaactttatcggtactggggtttctggtggtgaaaaaggtgcccttgaaggtccttctatcatgcctggtggacaaaaagaagcctacgaattggttgcggatgttcttgaagaaatctcagctaaagcaccagaagatggcaaaccatgtgtgacttacatcggtcctgatggagctggtcactatgtgaaaatggttcacaatggtattgagtacggtgatatgcaattgatcgcagaaagctatgacttgatgcaacacttgctaggcctttctgcagaagatatggctgaaatctttactgagtggaacaagggtgaattagacagctacttgattgaaatcacagctgatatcttgagccgtaaagacgatgaaggccaagatggaccaatcgtagactacatccttgatgctgcaggtaacaagggaactggtaaatggactagccaatcatctcttgaccttggtgtaccattgtcactgattactgagtcagtgtttgcacgctacatttcaacttacaaagaagaacgtgtacatgctagcaaggtgcttccaaaaccagctgccttcaactttgaaggagacaaggctgaattgattgaaaagatccgtcaagccctttacttctcaaaaatcatttcatacgcacaaggatttgctcaattgcgtgtagcctctaaagaaaacaactggaacttgccatttgcagatatcgcatctatctggcgtgatggctgtatcatccgttctcgtttcttgcaaaagattacagatgcttacaaccgcgatgcagatcttgccaaccttcttttggacgagtacttcttggatgttactgctaagtaccaacaagcagtacgtgatatcgtagctcttgcggttcaagcaggtgtgccagtgccaactttctcagcagctattacttactttgatagctaccgttcagctgaccttccagctaacttgatccaagcacaacgtgactactttggtgctcacacttaccaacgtaaagacaaagaaggaaccttccactactcttggtatgacgaaaaataagtaggtcagccatggggaaacggattttattacttgagaaagaacgaaatctagctcattttttaagtttggaactccagaaagagcagtatcgggttgatctggtagaggaggggcaaaaagccctctccatggctcttcagacagactatgatttgatgttattgaacgttaatctgggagatatgatggctcaggattttgcagaaaaattgagccgaactaaacctgcctcagtcatcatgattttagatcattgggaagacttgcaagaagagctggaagttgttcagcgttttgcagtttcatacatctataagccagtccttatcgaaaatctggtagcgcgtatttcggcgatcttccgaggtcgggacttcattgatcaacactgcagtctgatgaaagttccaaggacctaccgcaatcttaggatagatgttgaacatcacacggtttatcgtggtgaagagatgattgctctgacacgccgtgagtatgaccttttggcgacacttatgggaagcaagaaagtattgactcgtgagcaattgttggaaagtgtttggaagtatgaaagtgcgaccgagacaaatatcgtagatgtctatatccgctatctacggagcaagcttgatgttaaaggccaaaaaagctacattaaaactgtgcgtggtgttggatataccatgcaagaatagaaaagcagttgcagttgtgtaactgcttttttgaggagtttttatatattgacatacaatctagtttttactacaatcgttttaggaggatatataaaatgaagcttttgaaaaaaatgatgcaagtcgcattagcagtctttttctttggtttgctagctacaaatacggtatttgcgaataccacaggtggccgatttgttgataaggataatagaaaatattatgtaaaagatgatcataaagcaatctattggcataaaatagacggtaaaacttactattttggtgatattggagagatggttgtcggttggcaatacttagaaattcctggaacaggttatcgtgataatttattcgataaccaaccagttaatgaaattggccttcaggagaagtggtactattttggacaagatggtgctttgctagaacaaacagataaacaagtactagaggcaaaaacgtctgaaaatacaggaaaagtatacggtgaacaatatcctctatctgctgaaaagagaacttattattttgataataattatgctgtaaagacaggctggatttatgaagagggtcattggtattatttaaataagctaggaaattttggcgatgattcttacaatccactaccaattggtgaagttgctaagggttggactcaagattttcatgttactattgacattgatagaagcaaacctgctccatggtactacctagatgcttcaggtaagatgcttacagattggcaaaaagtaaacggaaaatggtattattttggctcctctggttctatggcaacaggttggaaatatgtacgaggcaaatggtattacttagataataaaaatggtgatatgaaaacaggatggcaataccttggtaacaagtggtactacctccgttcatcaggagctatggtaactggctggtatcaagatggttcaacttggtactatttagatccttctaatggagatatgaaaataggttggacaaaagtaaatggaaaatggtattatctcaattcaaatggagcaatggttacaggtagccaaactatcgatggtaaagtttataatttcgcctcatctggtgagtggatttaatattggagggtatatagatgaaaattttgaaaaaaactatgcaagttggactgacagtatttttctttggtttgctagggaccagtacagtatttgcagatgattctgaaggatggcagtttgtccaagaaaacggaagaacctactacaaaaagggggacctcaaagaaacctactggcgagtgattgatggtaagtactattattttgattctctatctggagagatggttgtcggctggcaatatatcccgtttccatctaaaggtagtacaattggtccttacccaaatggtatcagattagaaggttttccaaagtcagagtggtactacttcgataaaaatggagtgctacaagagtttgttggttggaaaacattagagattaaaactaaagacagtgttggaagaaagtacggggaaaaacgtgaagattcagaagataaagaagagaagcgttattatacgaactattactttaatcaaaatcattctttagagacaggttggctttatgatcagtctaactggtattatctagctaagacggaaattaatggagaaaactaccttggtggtgaaagacgtgcggggtggataaacgatgattcgacttggtactacctagatccaacaactggtattatgcaaacaggttggcaatatctaggtaataagtggtactacctccgttcctcaggagcaatggccactggctggtatcaggaaggtaccacttggtattatttagaccacccaaatggcgatatgaaaacaggttggcaaaaccttgggaacaaatggtactatctccgttcatcaggagctatggcaactggttggtatcaagatggttcaacttggtactacctaaatgcaggtaatggagacatgaagacaggttggttccaggtcaatggcaactggtactatgcttatagctcaggtgctttggcagtgaatacgaccgtagatggctattctgtcaactataatggcgaatgggttcggtaatgacagggcgcttataattatattagaacactcgcttaatcaaagaagtgactttgttgtacttgacctgacgattggggagattaaaagcatgtgaaatctacacatgctttttcgttagttatgagtgttgaacttgactaaccattgacaaaagataagagcaattaaaataagatacaaaaatatcaatgctaactgcaccgaaacgcccgatgctatggatagggctaatagggagagcagggacggggcgagaatgtccactgtgctcagagcagagcccaccgtccccatcttgtcactggggatatgggcaaagacagctgcttgtaggcgagggctgagaatgccgataatcgtagaactgatgaaactggtcatgaaaattacgatataggcttgacaaaggatactagttattagagtcaatagggaaatctcacagaaaaccaagaggtgcgtgaaacggatatttttaaatagattactgctggtcatattgccaaggatagctccacaagacatgatgatggagagcagggcgaggagttgcccaatgctcagttgtgctagtgtctgttggatgaagcggagggcaatcagccgaggggacacatccaagatggcaatcatactggtcgtcagaaacagtagtatgacggtatcttttaacctcaggagcacagccagcgactgtttaagatgttgaaaatatttcttaaaactcagtgctgtatgtgacatttcaattcttttttcaacctcatacaaggtatgtcgaataacatacaggcccaaaaaggcaatgacaaaagtcagagtgttgataagggaaatagtttgaatacttataacattgataaggaatgcgccagccagattggcgacaatacggacaaccctcatcagagactgcctgaaccccatggcatcatgcaggtcgtccttaattacactgatgtagagggcgttcatcatgtaggcagacaggtagctcaaggtgtcagagatgaggttgatgatgacaatcataatgactgaaactaatgaaaagggcgacaagacgagaaatactgtcaaaatagcgtagagcaggattttgattttggcaatccagagtgcgtgtttgactctattttcttgaaaatctcctagaatcccgagaaagagttgcgatagtaggggaaccatctctgaaatggaaatcagtaaaatcgctagcggagcgaaattgtactgagccacataattgataatggcgaggtagaaaatactgtcgccgaatgatgaaaaacagctgtttagcagcaactgtctatatatgttgtttgtccaaaataatttcatacttttctccttatgtctgcacatcgaatgggaatttattatttaatagacaccaatataccccatgcttcctattccgaagtcaaacaaatctgctttaccactatctccttgaaacatcagtaaaccgtgatcatctcgttcagaacatgctaaaattacctgttggatttttttcatcagtaatttgttttgattgtagacagtggtttgtagtaagctagttattccgtggcaatatcctgtcatcatttttagatgatggttaaaaacaaattcttgatatttactaataatatctttgtttccgtcacaatcgtacatacaaagatataagattattccggaaattcctttgcaccaagaaagttgtaaatttcctaaattttcagtattagaagtaactttttctaataatttttttaattcagtatggaatgtatggagatcattataaaacatagaaggttctaagactttagaataggcaaataaagcatatgcaattccacaatatccatgagcaaagctatagtctaaaatgctttctttggctgtatctctttgtaggaaataatgataaatttcccctatactattgtggatgaaaattttaagagtattgtcattggtaaattgatagtattttattaatgataataggacaccagattttcccaatgcaaagtctatttcctctagagtatcataattctctattaattttttagcggtgacgtttgctaattgtagatagtattgatttttactgatagaaaataaatgtaggagtaaccatagatagcctgcatcaccaaatagcagtgagtattgatattcatatgtgtgtgtcgttctaattgtcactgccttcttgatgatagagagtattttagaatccagttctggggggtacaatttatttagaggaaacagtagtccagctattccgtgttggaatgataaattacttacgaaatttccaaattctgttgaagaagtgatccttccttcagaatttacagttttatctagtaaaaattgtagaacactattacattctgttttgtaatcatatttatgttcctctatttttttaattttgactaaattatttgtttgacttaaatttagtagacattgtaaccaaaatagttgctcatctgtgagctgaccttgagtatgtgatagttctagtaattgaataggatcctttagttagattcaatcaatctataacacaacaacataataatacttttaggataacttatcaaatattatagtaaaatgagataataacaggataaatcgatcaggacagtcaaatcgatttctaacaatattttagaagtagaggtgtactattctagtttcaatctactatagtatatatttttacatcttgaattgtcaaattaagtgcataactttcccgtagcatacttcataaggcgttttccacttaagaaattttcgtggtcgattatttagaacctgtattcacaaaaaaatgttaagctagagttatgatacgcaaagcatatgatactgatttaaacgatcaagaatgggcgaagattgaaccctatttctccaaacaccgcacctataaatggccgaaacgagtacttgttaatgagactttgtacgtcactaaaacaggttgtcaatggcgcatgctccctcacgactttcctctttacttaatggtatggagtttctttcgtcgttctatgacgacaggttggttccaggtcaatggcagatggtactacgcttatagcgctcaggtgccttggcagtgaatacgaccgtagatggctattctgtcaactataatggcgaatgggttcaataatgaaagaagcgattgtgaatggaaacaatcgctttttttgtgaaaatataataaaatagataggaaagaattaatacttgtatgaaaaataagacgttttttcgtctagtaaaaggaaaaaatgacaaaaaaagttggtgtcggtcaggcacatagtaagataattttaataggggaacatgcggtcgtttacggttatcctgccatttccctgcctcttttggaggtggaggtgacctgtaaggtagttcctgcagagagtccttggcgcctttatgaggaggataccttgtccatggcggtttatgcctcactggagtatttgaatatcacagaagcctgcattcgttgtgagattgactcggctatccctgagaaacgggggatgggttcgtcagcggctatcagcatagcggccattcgtgcagtatttgactactatcaggctgatctgcctcatgatgtactagaaatcttggtcaatcgagctgaaatgattgcccatatgaatcctagtggtttggatgctaagacctgtcttagtgaccaacctattcgctttatcaagaacgtaggatttacagaacttgagatggatttatccgcctatttggtgattgccgatacgggtgtttatggtcatactcgtgaagccatccaagtggttcaaaataagggcaaggatgccctaccgtttttgcatgccttgggagaattaacccagcaagcagaagttgcgatttcacaaaaagatgctgaaggactgggacaaatcctcagtcaagcgcatttacatttaaaagaaattggagtcagtagccctgaggcagactttttggttgaaacgactcttagccatggtgctctgggtgccaagatgagcggtggtgggctaggaggttgtatcatagccttggtaaccaatttgacacacgcacaagaactagcagaaagattagaagagaaaggagctgttcagacatggatagagagcctgtaacagtacgttcctacgcaaatattgctattatcaaatattggggaaagaaaaaagaaaaagagatggtgcctgctactagcagtatttctctaactttggaaaatatgtatacagagacgaccttgtcgcctttaccagccaatgtaacagctgacgaattttacatcaatggtcagctacaaaatgaggtcgagcatgccaagatgagtaagattattgaccgttatcgtccagctggtgagggctttgtccgtatcgatactcaaaacaatatgcctacggcagcgggtctgtcctcaagttctagtggtttgtccgccctggtcaaggcttgtaatgcttatttcaagcttggattggatagaagtcagttggcacaggaagccaaatttgcctcaggttcttcttctcggagtttttatggaccactaggagcctgggataaggatagtggagaaatttaccctgtagagacagacttgaaactagctatgattatgttggtgctagaggacaagaaaaaaccaatctctagccgtgacgggatgaaactttgtgtggaaacctcgacgactttcgacgactgggttcgtcagtctgagaaggactatcaggatatgctgatttatctcaaggaaaatgattttgccaagattggagaattaacggagaaaaatgccctggctatgcatgctacgacaaagactgctagtccagccttttcttatctgacggatgcctcttatgaggctatggcctttgttcgccagcttcgtgagaaaggagaggcctgctactttaccatggatgctggtcccaatgttaaggtcttctgtcaggagaaagacttggagcatttatcagaaattttcggtcatcgttatcgcttgattgtgtcaaaaacaaaggatttgagtcaagatgattgctgttaaaacttgcggaaaactctattgggcaggtgaatatgctattttagagccagggcagttagctttgataaaggatattcccatctatatgagggctgagattgctttttctgacagctaccgtatctattcagatatgtttgatttcgcagtggacttaaggcctaatcctgactatagcttgattcaagaaacgattgctttgatgggagacttcctcgctgttcgtggtcagaatttaagacctttttctctagaaatctgtggcaaaatggaacgagaagggaaaaagtttggtctaggttctagtggcagcgtcgttgtcttggttgtcaaggctttactggctctgtatgatgtttctgttgatcaggagctcttgttcaagctgactagcgctgtcttgcttaagcgaggagacaatggttccatgggcgaccttgcctgtattgtggcagaggatttggttctctaccagtcatttgatcgccagaaggtggctgcttggttagaagaagaaaacttggcgacagttctggagcgtgattggggcttttcaatttcacaagtgaaaccaactttagaatgtgatttcttagtgggatggaccaaggaagtggctgtatcgagtcacatggtccagcaaatcaagcaaaatatcaatcaaaattttttaacttcctcaaaagaaacggtgacttctctggtagaagccttggaacaggggaaatcagaaaagattatcgatcaagtagaagtagccagcaagcttttagaaggcttgagtacagatatttacacgcctttgcttagacagttgaaagaagccagtcaagatttgcagaccgttgccaagagtagtggtgctggtggtggtgactgtggcatcgccctgagttttgatgcgcaatcaaccaaaaccttaaaaaatcgttgggccgatctggggattgagctcttatatcaagaaaggataggacatgacgacaaatcgtaaggacgagcatatcctctatgcccttgagcagaaaagttcctataatagctttgatgaggtggagctgattcattcttccttgcctctttacaatctggatgaaatcgatctttcgacagagtttgctggtcgaaagtgggactttcctttttatatcaatgccatgactggtggaagtaataagggaagagaaatcaatcaaaagctggctcaggtggcggaatcctgtggtattttatttgtaacgggttcttatagcgcagccctcaaaaatccaacggatgattctttttctgtcaagtctagtcatcccaatctcctccttggaaccaatattggattggacaagcctgtcgagttaggacttcagactgtagaagagatgaatcctgttctattgcaagtgcatgtcaatgtcatgcaggaattactcatgcccgagggagaaaggaagtttagaagctggcaatcgcatctagcagattatagcaagcaaattcccgttcctattgtcctcaaggaagtgggctttggaatggatgccaagacaatcgaaagagcctatgaattcggtgttcgtacagtggacctatcgggtcgtggtggcaccagctttgcctatatcgaaaaccgtcgtagtggccagcgtgattacctcaatcaatggggtcagtctaccatgcaggcccttctcaatgcccaagaatggaaagataaggtcgaactcttggttagtggaggggttcggaatccgctggatatgattaagtgcttggtttttggtgctaaggctgtgggattgtcacgaaccgttctggaattggttgaaacctacacagttgaagaagtgattggcattgtccaaggctggaaagcagatctacgcttgattatgtgttcccttaactgtgccaccatagcagatctacaaaaagtagactatcttctttatggaaaattaaaagaagcaaaggatcagatgaaaaaggcgtaaccagcgccttttttccatcctcagactgaggtgacttttttgaattgtgataaaatagaagggagaggatgaacctatgagaaaatttaaaatctttttatttatcgaagcctgtcttctgacaggagctctgattttgatggtatcagagcatttttcgcgttttctgctgatactattcctctttttgcttttgattcgctactacactggtaaagagggaaataatcttcttttagtagcggcaaccattctcttctttttcatcgttatgctcaatccttttgtgattctagctatttttgttgcggttatctatagcctctttcttctttacccgatgatgaaccaggaaaaagagcagaccaatttggtttttgaagaggtcgtgacggttaagaaggagaaaaatcgttggtttggaaatcttcatcatttttcaagctaccagacttgccaattcgatgatatcaatctctttcgcttcatgggcaaggacactattcatctggagagggtcatcttaaccaatcatgacaatgtcattatcctcagaaagatggtaggaacgaccaaaatcatcgtacctgtagatgtggaagtcagtctcagcgttaactgtctctatggggatttgatttttttcaaccagcccaagcgagccctccgcaatgaacactatcatcaagaaacaaaagactatctcaagagtaacaagagtgtcaagattttcttgaccactatgattggtgatgtggaggtggttagaggatgaaaaaacaagcctatgtcattattgctctcacctccttcctatttgtcttttttttctcccacagcttgctggaaatacttgattttgactggtctatctttttgcacgatgtcgaaaaaacagaaaaatttgtctttttattgttggttttcagcatgtccatgacctgtctcttagccctgttttggcgagggatcgaagagctttctctaagaaaaatgcaggctaatctcaagcgtttattagcagggcaagaagtggttcaggttgcagatccagatttggatgccagtttcaagtccttatcaggtaaacttaaccttttgacagaggctcttcaaaaagctgaaaatcagagccttgctcaggaagaggaaatcatcgagaaggaacggaagcgaattgctcgggatttgcacgatacagtcagtcaggagttgtttgcggcccacatgattttatcgggtatcagtcagcaggctttgaaattggatagagaaaagatgcagacccagttgcagagtgtcacagctattttagaaacagcccagaaggatttgcgggttttgctcttgcatttgcgaccagttgaactggagcagaagagcttgatagaagggattcaaattcttttaaaagagcttgaggacaagagtgatcttagggttagtctcaagcagaatatgacgaaattgcctaagaaaatcgaggagcatatcttccgtatcctgcaagagttgattagcaataccctccgccatgcccaggcatcttgcctagatgtctacctctatcagacagatgttgaattgcaactgaaggtggtggacaatgggattggtttccagttagggagcttagacgacttgagttatggactgcgaaatatcaaggagcgggttgaagatatggctggaacagttcaactcttgacagctcccaagcaagggctggcggttgatatccgtattcccctgttagataaggaatgataaaggagtaaagatgaaaattttactagtagatgaccatgaaatggtccgattgggcttgaaaagctactttgacctccaagacgatgtagaagttgtgggtgaggcgtccaacgggtctcaagggattgacttggccttggaactgcgtccagatgtcattgtcatggatattgtcatgcctgagatgaatgggattgacgcgaccttagcaatccttaaagaatggcctgaagccaagattttgattgtgacctcttatttggacaatgaaaaaatcatgccagtcttagatgctggtgccaaaggctatatgctcaagacttctagtgcagatgaattgcttcatgccgtcagtaaggtagctgctggcgagctggccattgagcaagaggttagcaagaaggttgaataccaccgcaatcatatggaacttcatgaagaattgactgcgcgtgagcgagatgttctccaactcatcgccaagggctacgaaaatcagcgcatcgcagatgacctctttatctctctcaagacggtcaagacccacgtgtccaatattcttgccaaacttgaagtcagcgatcgtacccaggcggctgtctatgcctttcagcaccatttggtggggcaagaggagttttagatgagtttagcagatttacttgaggagctagaagcagcaaaagactctaaaaaagcaaggtccatggaagcctatatgcgccatcaattttcttttctaggtattgcggtgcctgaaagaaataaactctataaaatattttccagaagcgaaaaaaacaaagattatcgattgggattttgcagacacttgctgggaaaaggatcctagaaaataccaatatgtggctgctaactatttgaaagcaatgcagtcttatctaaaggaaaccgatttgcctaagctagagcagttagtcgtgacaaaatccttgtgggacacggtagatatcctagatcgagtagtagggagtttggtgtatgaacaccctgaactagaagaaataatcttaatactcttcgaaaatctcttcaaaccacgtcagctctatctgcaacctcaaaacagtgttttgagcaacctgcggctagcttcctagtttgctctttgattttcattgagtataaaatggagcctatcagataatatctggctgagacgtgtcgctattgaccaccagttgttaagaaaagagaagaccaatactcaattaatggaaaagattctccttcataacttgaaccaaacagaattttttatcaataaagccattggctggactctgcgagactactccaaaacgaatcccacttgggtaacatgctttattgagaaaaacaaggaaagaatggctgaacttagtatcaaagaagcaagcaagtacctctagcgtgattgaaaagcgcagtcattaattgaaaagtttacctgtttatgtgataatggagggtatttaaagaaggtggtagatttcttgattctatagtagattaagaaatttagaatagtacgctataattacattaggaggatacaataatgaagaaaactgtttataaaaaattgggtatttcaattattgcgagtactttattggctagccagttatcgacagtatctgctttgagtgttatttctagtacaggtgaagaatatgaggtaagtgagacactagaaaaaggtccagagtctaatgattcttcattatctgagatttcaccaacgtatggttcatactaccaaaagcaatcagaagtattatcggtaatgatgatttgattaaaattgataatactttacagtatccgtattcgacttcagctatggttttatctaagtattatggagtagccgatggaatgaatgtagaagggaggggaagtgcgaattttattaaagataatgtgttaattacagcggctcacaactactacagacatgactatgggaaagaagcggatgatatttatgttcttccggctgttagtccaagtcaagaaccatttggaaagatcaaagtaaaggaagttcgttatttgaaggaatttagaaatttaaattctaaggatgcaagggaatatgacttggctttattaattctagaagagcccattggtgcaaaattagggactttgggtcttcctactagtcaaaaaaatttgacaggaataactgtgactatcacaggctatccatcatataattttaaaattcatcaaatgtatacagataaaaaacaagttttaagtgatgatggcatgttcttggattaccaagttgatactttagaggggtctagtggatctacagtttatgatgctagtcaccgtgtagtaggagtgcatactttaggagatggagctaatcaaattaacagtgcagttaaattaaatgaacgaaatttgccatttatttattcggttcttaaaggttactctcttgaaggatggaagaaaataaatggtagttggtaccattatagacaacatgataaacaaacgggttggcaggagataaatgatacttggtattatttagacagttccggtaagatgcttacagattggcaaaaagtaaatggaaaatggtattatctcaattcaaatggagcaatggttacaggtagccaaactatcgatggtaaagtttataacttcgcttcatctggtgagtggatttaatgttggaggatatataaaatgaagcttttgaaaaaaatgatgcaaatcgcactagccacatttttcttcggtttgttagcgacaaatacagtatttgcagatgattctgaaggatggcagtttgtccaagaaaatggtagaacctactacaaaaagggggatctaaaagaaacctactggagagtgatagatgggaagtactattattttgatcctttatccggagagatggttgtcggctggcaatatatacctgctccacacaagggggttacgattggtccttctccaagaatagagattgctcttagaccagattggttttattttggtcaagatggtgtattacaagaatttgttggcaagcaagttttagaagcaaaaactgctacgaataccaacaaacatcatggggaagaatatgatagccaagcagagaaacgagtctattattttgaagatcagcgtagttatcatactttaaaaactggttggatttatgaagagggtcattggtattatttacagaaggatggtggctttgattcgcgcatcaacagattgacggttggagagctagcacgtggttgggttaaggattaccctcttacgtatgatgaagagaagctaaaagcagctccatggtactatctaaatccagcaactggcattatgcaaacaggttggcaatatctaggtaatagatggtactacctccattcgtcaggagctatggcaactggctggtataaggaaggctcaacttggtactatctagatgctgaaaatggtgatatgagaactggctggcaaaaccttgggaacaaatggtactatctccgttcatcaggagctatggcaactggttggtatcaggaaagttcgacttggtactatctaaatgcaagtaatggagatatgaaaacaggctggttccaagtcaatggtaactggtactatgcctatgattcaggtgctttagctgttaataccacagtaggtggttactacttaaactataatggtgaatgggttaagtaatgaaggctaattgtaaactgtgatggatacttaactttgtataataggtggataaaagtcttcacaatcaaaaaacgcatagtatcaaggtttttctgtactgccctcaaacagttagacaattaatttatccgaaggatttagttctgtattgcacagggctaagtccttttagttttaccttaattcgtttattgttgtagtaatcaatatagtctataatggcttgttccaattgcttaagcgactgaaacgacttctcataaccgtaaaacatttccgatttcagaatcccaaagaaggactccatcatactattgtctgggctgtttcccttacgtgacatggatgcttgaattcccttactctctaggaaccgatgataagaatcgtgttggtattgccagccttggtcactatggagaatcgtattctcgtagtgcttctctgtgaatgcctgttccaacattgtttgtacttgttctaagttgggtgaagttgaaagattataggcgataatttcgctattaaagccatctaaaactggtgataagtaaagcttttgagtacttgctggaatggcaaattctgtcacatctgtgtagcacttttccattgttttagagccttcaaattggccttgaatgagattctctgccttcttgccaacgtcttttatgagaagaatattttcgtttctgtcgcgttttagcttgtaaattgagtactttcatcaagccttgaattcttttatgatttaccagataaccacgatttcttagttctaaatgaacccggcgataagtataatttcccttgtgttcgataaaaatggattgaatttcagctttaagctcttagtccttatctggtttatctagctgtttcaagtgatagtagtaggtcgaacgagctagtttaatgacttttagaagaagagctaacgaaaattcagtcattaattcttgaacaatttctgtctttcttctttctcctccttcaatcggagttctcttaacttttttaggatggcattctccgctctcaggtactcattttctgcttgaagacgttctaattctgtcctctcttcaggtctcgtttttggcttacgtcccattttaggtactctccctcttgttttctcaacaatagtatacccgtttttcctgtattgtgctagccagttaagaagtatcgtacgacttgggagaccgtattcaagagaaactctatctttagtccagccttcatgtcagactttattactcatttcttgttttaaatcaggagaatagtaacgattttttccttttttgacgaactctattccgtaacgatcaatcaatttaatcatgtacctaatattagaattgcttatcccaaatttatttgaaagcttctctaagctatatccttgttttctaagttcatagatctgaactttatcatcataagttagtttcataataaaaacaccccaaaagttagattttttctgtctaacttttggggtgtagttcatgtacacctgatatgatgcgttttataatttttaagcctttttgcccagcctcgtcaaaagtaatgttttgacacaaaatctgtgacaaaactttagttttaaaggtttttaactttgtatatactagttttaagaaaaggaggatgatctaatggaagaaaaagtatcattgaaagtcagggttcaaaaactagggacatcgctttcaaatatggttatgcccaatattggagcatttattgcttggggagtattgactgccctctttatcgctgatggctatctgccaaatgaacagttagctactgttgttggtcctatgttaacgtatttattgccaatcctgattggttacacaggtggatatatgatccatggccaacgtggtgccgttgtaggagctattgctactgttggtgcaatcacaggttctagtgttcctatgtttatcggagctatggtaatgggcccactgggaggatggactatcaagaaatttgatgagaagttccaggaaaaaattcgtcccggatttgaaatgttagttaataacttctcagctggtctcgttggttttgcattattgcttttggctttctacgcaatcggtccagtcgtatcgactcttactggagctgttgggaatggtgttgaggctattgtcaatgctcgcctccttcctatggctaatattatcatcgaaccggctaaagtccttttcctcaataatgccctcaatcatggcatttttactcctctgggagtagaacaggtagctcaagctggtaagtcaattctcttcctattggaagctaatcctggaccaggtctgggaattctattagcttatgctgtattcggtaaaggttctgctaaatcttcttcttggggggcaatggttattcatttcttcggagggattcatgaaatttactttccttatgttatgatgaagcctactctatttttagctgctatggcaggaggtatctctggaacttttacttttcaactcttagacgctggtcttaaatctccagcttcaccaggttctattattgcgattatagctacggcgccaaaaggtgtttggccccatctaaatgttcttttaggtgttttagtggcagcagttgtttctttccttgtagcagcccttattcttcatgcagacaagtcaactgaggattcgctcgaagctgctcaggcggctacccaagcagctaaggctcagtctaaaggtcagttagtatcaacttctgttgatgcagttgtttcgacagactcagtggaaaaaatcattttcgcctgcgatgctggtatgggaagctctgctatgggagctagtattcttcgagataaggttaaaaaagcaggtctagagattccagtatctaatcaggcaatctcaaatttgcttgatacaccaaaaacattaattgttactcaggaagaactgacaccaagagctaaagacaagagtccaagtgctattcatgtttctgttgataatttcttagcgtcctctcgttatgatgaaattgtagcttcattaacaggagcttctccaatagcagaaattgaaggagatataccaacttcagcaccagtagatagtcaggaaagtgaccttaaccatattgatgctgtagtagttgcttatggtaaagcacagggaactgcaactatgggctgtgaaacgattcgggctatttttagaaacaagaatattcgtattccagtttctactgccaaaatttcagaattaggtgaatttaattctaaaaacataatgattgtaacaactatttctttacaggcagaagtgcagcaagcagcaccgaattctcaatttcttattgtggatagtttagtaacaacaccagaatatgacaaaatggctgctagaatgtacaaatagaactagaggtttctaaattacgaatgctattaaccaaacgagaagaacaattattgaaggctttcctacatgtagggaagctttcaatgcaagatatgactgaaatcttacaggtttcatctagaacaatttatcgaactttatcagatttgacagatagcatggagcaatatggaatcgaaataacgaagcatgggaaatactatattttgactggagagttggatgatttgccgacagaacttgaagtgttagttgagtatagtccccaagaaagacaagagttgattacctatcgccttctgactgagagtggttttgtcaccaatgaagcattgcaagagtgcacgaaagtcagtaatgtaactattattcaggatatttcagatattgataagcgtcttttagactttgatctgaaaattgaacgacaaaaaggttatcggatttctggtgattcagttggtaagagaagatttttggctattttactgacaaactgtatctcagtagcagatttttcaaccggtaattttgggagctttgatattttagaagcagatagaactgggctggccagtcagattgttaataagcaactgtcaggttttccagatatggatgctaggatgaagatgttttttgcgatcttgttatctcttataggtcaggagcaaaacattgaaaattcacctaatactagtaagcaggctttggaaatttctcaaaaaatttttcaagcttactctaagcagactgcacaattttatagtattcaggaaattatctattttgcgagcatcttggatgaattaatcattaaacgtcaggacaatccgctctttacggagaaatttgatggtgaatttttctacaatatttcaaatctgattgatacggtttccatgtataccaagattgacttttttaaggacaaggttttattcaattttcttttccatcatattcggctcagtttaggcgtccctatcctttttcagggtgaaaatttgccagaatctatccagattttagttgaaaggaataaatttctttatacagtcatcagtcttttagtgaatgatatttttccgaaatatcttcatacagagtatgagtatggcatgattgccctacattttatctctagcttaggccgtagtccagagatttatccagtccgtgttttgcttttaacggatgaacgtcgggtcactagagatttattagtcagtaaaattaagagtgttgctccttttgtagagttgatagatattcaatctctagtagattaccacagtattgatctcagtcagtatgattatattttatctaccaagccgctgactaatcaggaaatcgatgtaatttctagttttccaaccgtcaaagaattgcttgaattacaggaacgacttcagtatgtacaggcacatcgtacaattgtcgcgcgtgatgctatcgctccagagaaaagttatgacttgcaagattatttaatatctagtagtcagcttttgagtcaattcgagttggttcaattggagaataatcaatcatttgagcacacggtagaacaaatcatccaatatcagaagaatgtgagtgacagagcttacctaacaagaaaattgttatctcacttccagaatagtcctatggctattcctaatactggtctggtgcttttacatagtcagtctagcaaagtaacaacaaatagttttactatgtttgaactcaaactacctatctccgcattgtcaatgaaacgagaggaagaagaggtcaaaaggtgtctgctaatgctaatgtctaaagaagctagcgaggaagctagagatttaatgacagctattagtcagtcgattattgaaaatcatctttatacagagatttacaagacgggaaatcaatccattatttatcagatgctaaatactatttttaacgaaaaaattaagaaattggagaactaatatgaaacttgaaaaacatttgattaagcttaataaacaattttctaacaaggaggaagctatttgttattgtgggcaagttctttatgagggtggatatgttaatgaagactatattgaagccatgattgagcgagataaagagctatctgtttacatgggtaactttatcgccataccgcatggaacagatgcagcaaaaaatgatgtcctcaagtctggtattacagtcgttcaagtccctagaggggttgattttgggaatgtatctaaccctcaagtggcaacggttctttttggtattgctggtattggtaatgaacacttagaaattattcagaaaatttctatcttctgtgcagatgtagataatgttcttaaactagcagatgctcagtcaaaagaggaagtattgcgcttatttgatgctgttgaataattgaatttagtcatttgtcatctagtatatatgtccctcaaataggaaaaggagaaattgaatgaaacattctgttcattttggtgccggtaatatcggtcgtggttttataggtgaaattctatttaaaaatggtttccatattgattttgtggatgtcaataatcagataattcatgctctgaatgaaaagggcaagtatgaaattgaaattgcacagaaaggacagtctcgtatagaagtaactaatgtggctggcattaatagcaaagaacatcctgagcaagtcattgaagcgattcaaaagacggatattattactactgcaatcggacctaatatactcccttttatcgccgaacttctagccaaaggaatcgaagctcgccgagttgcaggaaatacacaggcattggatgttatggcctgtgaaaatatgattggcgggtctcaatttctttatcaagaagtcaagaaatatttaagtccggaaggtttgacatttgctgataactacataggttttccaaatgctgcagtagacaggattgttccagcacaaagtcacgaagattccctttttgttgtggtcgagccctttaatgaatgggtcgtggaaaccaagcgtcttaaaaatccagatttacgtctaaaagatgtgcattatgaagaagatttagaaccctttattgagcgaaaacttttttcagtcaattctggacatgcaacttcagcttacattggtgcgcattatggtgccaagacaattttggaagctcttcaaaatcctaatattaaatctcggattgaatctgtattagctgaaattcggagtctcttgattgccaaatggaactttgataaaaaagaattggagaattatcacaaagtcattatagaacgacttgaaaaccctttcatagtggacgaggttagtcgcgtagctcgtactccaatccgaaaattaggctataatgaacgattcatccggccgatacgtgaattgaaagaactcagtttgtcatataaaaacctacttaaaacagttggctatgtctttgactatcgcgatgtaaatgatgaagaaagtattcgattaggtgaattgttggctaaacaatcagtcaaagatgttgttatacaagttacaggtttagacgaccaagaattgattgagcaaattgtagagtatatttaatctttttcgaaaatctcttcaaatcaggttagcatcgctttgtcttaggcatatgttgttctatctacaacctcaaagcagtgctttgagctgactccgtcagtcttatctgcaatctcaaaacactgtttgagttatctgcggtaatctttctagcttgtctttgatttttgttgttatttataaggtaaaagaagctggacaaaaagtcttcaaaatcgggaaaaggcagcctatcgggtgttcaaaaatcttgataggatgtcctttattatggaaagccttattggattttctcctcagattgagtttttgatcagctttatgagataggtcttgctagagatgtagcccatcatgttatttttatggacagtgggaaaattgttgaaaaaaataatgcccatcaattctttagtcgtccaagagaagaacgaaccaagcaattttggaacgaattctttcgaatgcgatctatatagtaaaatgaaacaagaacaggacaaatcgatcaggacagtcaaatcgatttctaaaaatgttttagaagtagaggtgtactattctagtttcaatctactatataactgaaaaattagataaattagttttggaaaatgactaaccaaaagatatccaaagtagtctaaaattgtctatactttatgagtgttttagttaggaaaaaggcttgttgtctataattgtctgcattagtctagattttatttatagaaaatgttataatagactgtatttaaaaaattttaaggagaaatgacagaatgtctgtatcatttgaaaacaaagaaacaaaccgtggtgtcttgactttcactatctctcaagaccaaatcaaaccagaattggaccgtgtcttcaagtcagtgaagaaatctcttaatgttccaggtttccgtaaaggtcaccttccacgccctatcttcgaccaaaaatttggtgaagaagctctttatcaagatgcaatgaacgcacttttgccaaacgcttatgaagcagctgtaaaagaagctggtcttgaagtggttgcccaaccaaaaattgacgtaacttcaatggaaaaaggtcaagactgggttatcactgctgaagtcgttacaaaacctgaagtaaaattgggtgactacaaaaaccttgaagtatcagttgatgtagaaaaagaagtaactgacgctgatgtcgaagagcgtatcgaacgcgaacgcaacaacctggctgaattggttatcaaggaagctgctgctgaaaacggcgacactgttgtgatcgacttcgttggttctatcgacggtgttgaatttgacggtggaaaaggtgaaaacttctcacttggacttggttcaggtcaattcatccctggtttcgaagaccaattggtaggtcactcagctggcgaaaccgttgatgttatcgtaacattcccagaagactaccaagcagaagaccttgcaggtaaagaagctaaattcgtgacaactatccacgaagtaaaagctaaagaagttccggctcttgacgatgaacttgcaaaagacattgatgaagaagttgaaacacttgctgacttgaaagaaaaatacagcaaagaattggctgctgctaaagaagaagcttacaaagatgcagttgaaggtgcagcaattgatacagctgtagaaaatgctgaaatcgtagaacttccagaagaaatgatccatgaagaagttcaccgttcagtaaatgaattccttgggaatttgcaacgtcaagggatcaaccctgacatgtacttccaaatcactggaactactcaagaagaccttcacaaccaataccaagcagaagctgagtcacgtactaagactaaccttgttatcgaagcagttgccaaagctgaaggatttgatgcttcagaagaagaaatccaaaaagaagttgagcaattggcagcagactacaacatggaagttgcacaagttcaaaacttgctttcagctgacatgttgaaacatgatatcactatcaaaaaagctgttgaattgatcacaagcacagcaacagtaaaataatcttaataaacagaaaacccacctgaattggtgggttttctgatgcactattttccaaaaatctctttgaggtctgtgtctgtaatcccaatcatggctgggatgcggtcccagttttcttcggttaggatgtaggattgttcagaggcacttgatgtgactgtttcagagacagcttgttgcttttcttcaacattctccagtagatcactgaagcgttcaatcagataggtttttcgggcagttccgatgtgttgggtagcatagtcgaaggcttgtaattcgcctagtaagatgagtttgcttttggcacgtgtaatggctgtgtagatgagatttcgctccagcatacgtcggctagcactagtaatcggtaggatgacaactgggaactcacttccctgagacttatgaatactcatggcataggccaagcgaatcttgtaccattcgttacgggggtaagagacttcattaccatcaaaatcaatgacaatctcgtcttgtttcgattcggtgtatttaccaggaatcaggtctgtgatagctcctaaatccccattaaagacattgatttcagcatcgttaaccaaatgaatgaccctgtctctcttacgatagtgacactgaggagcttcaaaactgagttgatctttttgtgggggattgagcaggtcttgcatgagctgattgatagcatcaatccctgccgtccctcggtacataggagccagaacttggatatcacgggcgggaataccatttctgagggcggcacctaagattttttcaatggtggcaggaatatggccactagcaatttcaaagtaggaacggtcagcttttttttgggtgaaatcagctggcaagatgccctgtcgaatctgactagctagggtgacgatggttgattctttgctttgtcgataaattttttccaagcgagtctgaggaatcaaaggaatatgaagtagatccgctagaacctgtccaggactgacagaaggtagctgatcactgtcacctacgatgaggatcttactgttagaagagatattggagaagagttgattggccagccaagtatctaccatagagaattcatccacgatgataaagtcagcatctaggtaatcttccagatgactggtatcatcgtcacctgtcattcccaagtggcgatgtatggtcgcgctaggcaaacctgtcaattcattcatgcgacgagcagctcgaccagttggagcagcaagaagaatgggcagattgcttttcttcctgaagtcaagtccttctaaaagggcataaacagcaatgattccattgataacagttgtcttaccagtaccaggcccacctgtcaggataaagaccttattctggatagcatcacagatagcctgtttttgaatgttatcatactcaattcccagttcttgctcgacagtagtgatatgtttttgaatggtttctaaatcatgactcttctgttttcctttttcaaggatacgaaccaagtgactgcggatgccttcctcagcgaaaaagaggctgttgtcaaagatcttggtatcaatctgctgaaccttgtcttcttcgatcaggtaggagagctcttgggcaacttggctggggtctagttccacgggacgggaagactcaaggagagtaagggtttgttccagcaaatcccgtgcttcaacataggtgtcccctgtttccatacaggcctgaaaaagactgtgaactagaccggcgcggaagcgttcaggagcctgactttcgatgcctagttcctcagctagttggtcagcaatggtaaagcccaaacccttgatatcctcaaccagctggtagggataattttcaaccacatcaagggtttcttccttgtaaaagtcttgaatctgaaaggctagtttgttgggaatgccgtagttggctagtttggccaaaatcatctccgttccgtagttgagacggagagtggagacgaaagcctcgcgatttttggcagagagtcctgcgatgccttctaacttttctgggtgttgcaaaatttcgtcaatggtattttcgccataggtatccacgattttctgagctgtcttgagaccaatccccttgaaatggctacttgaaaagtacttgaccaagcccttactagttggttttgcgcgatcataacgactgatttgcagttgttctccatacttggagtgctggacaatttgcccccaaaaagtatagtcttcgccctcaattacatcagccatggttcctgtgacaatgatttcaaaatcatcaaaatcctctgcgtccgtatcgtcgatttctaggaggaggatgcgataaaaattgctgggattttcaaaaataatccgttcaatagttcctgaaaaataaacttccataaaattcctttgcatgaataggtgagagttgggattgtttttattttatactcttcgaaaatatcttcaaaccacgtcagcttccatctgcaacctcaaaacagtattttgagctgacttcgtcagttctatccacaacctcaaaacactgttttaagcagcctacggctagcttcctagtttgttctttgattttcattgagtatttgtaaataaacaatcacttctcacgatagaagaagaggctgagattggtgattctctgcctcttaggtttcttaaaatgttccgatacgggtgattggccataagcggaatttagcttcccctgtgatatcttttgctttgaaggtacctacgtggcggctgtcgctcgaaaccaagcggtcatctccgaggagaaggtattctccttctggaacagtaaagctaaagttggtgttgtagttgacatcaactgtgaaggcttgagctttttgagcgatacttctaaagaaagttcctttatttccttcaaagcccttgcctgagtaagtgctttggagtttgtcatccttgaagcgtttgatatagtctgctagataaggctcgtccgtttctttgtcattgatgtagagtttatcattttcgtaacgaatggtgtcgccaggcattccaatcacgcgcttgacgatgtccttattgccatcttcctcatgggccaccacgatatcaaaacggtcaataggaaggtgttttacaacgaagagaatttcgccatccgctagggtcggatccatggaatgtccttctacgcgaacattgctccaaaaaaagatacgacttaaagctagtaatgacagaattaggaggaacaatccccactcttttaagaaatttttaaatgaattcataacttacctttctaagcgttttttcgctttttcagtgtttttaaagtgcaatttggcgcagaagctgagtccctgcataccataggcttgcaaaatctggctagccaccttgtcagaagccgttccagctccacttgggagctgataacccagttctcgtcccaaattttcaagattttccagaaagagatcacgcgcaatgacagaagaaactgcgacagacaagtatttgccctcagccttttcttctaagctgataggattgctgaaacgattggcctcttgtgccaagtacttgtcataatttttagcactggtaaaggcatcaatcacaattttctcaggctgaacacctttttgaaggaggagatagatagcctgattatggagggcaaccttaaccgaaacagcgttgtagcggtctccgatgacctcgttgtacttgctgggtgagagaaggagtgcctggtgctgaattttttccttgagaataggagtaatctgacggatcttttggtcggtcagagtcttagaatcccccacaccgagttttcgtaaaaagtcgtgctggtcaggtgtgacaaaggcagccacaactgcaagcccaccaaagtaggaaccatttcccacctcatctgtcccaattaaaggaagattttgtccgctggtttgctctacagcttgatagccaaagaaactggcgtatttttcagccccttcaccctgaagcaagatttttccagaagtatagatagaaaccgttgcttgaggtagtttcaaaaagtagcggatatagggattcttgctaggagccagactggtttgatagtgttcaagaaaagcctgaatatccttttcgcttggtgtgagtgtgatacttgccatagtttctattgtaccacaaaagcagtaaaatttgtaaaaactgacaaaattagcgaattttggtataatatcgtgaggtgaattttatggcaaatctaaatcgattcaaatttacattcgggaaaaaatcgttaaccttgacaagcgaacatgacaacctttttatggaggaaatcgctaaggttgcgacagaaaaataccaagcaattaaagaacaaatgcctagcgcagatgatgaaacaatcgctcttttgttggcagtcaactgtttatcaactcagctcagccgtgagattgaatttgacgataaggagcaagagctagaagaactccgtcacaagcttgtgacttgtaagcaagaacagagcaagattgaggattccttatgatttcattccttcttctattggtcttggtttggggattttatatcggctatcggagaggcctgctcttacaggtttattacctgatttcagccatggcatcggcttttatggctggccagttttataaggggcttggagagcaattccatttattgctcccttatgcaaattcgcaggaaggtcaggggactttctttttcccatcggatcaactctttcagctggataaggtcttttatgcaggtatcggctacttgcttgtatttgggattgtctatagcattggtcgtttacttggtcttctcttacacttgattcctagcaaaaaactgggtggtaagttgttccaagtttcagcaggtatcttgtccatgttggtgaccttatttgtcttgcaaatggccttgacaatcttggcgaccatccccatggcagttatacaaaatcctcttgaaaagagtatcgtcgcaaaacacatcatccagagcataccggtaacaaccagttggctcaaacaaatctgggtgacaaatttaatcggataaaaagggcaggagttttcctagccctttgtttacagatttgactcgaatctatcagaatgtaaaaagctaccacacctagacattcaaagacaaggaaataaagatgaataagaaaatattagaaacattagagttcgataaggtcaaggccttgtttgagcctcatttgttgaccgagcagggcttggagcaattgagacaactggctccgactgccaaagcagataaaatcaaacaggcttttgctgagatgaaggaaatgcaggctcttttcgtcgagcaaccgcattttactattctctcaactaaggaaattgcaggagtctgcaagaggttggagatgggagcggatctcaatatcgaggagttcctactcttgaaacgcgtgcttcttgccagccgagaacttcaaaatttttacaccaatctggaaaatgtcagcttggaagaattagccctttggtttgagaaattacatgattttccgcaattacaaggaaatcttcaggcctttaatgatgcgggtttcattgaaaattttgccagtgaagaattggcgcgaatccgtcgaaaaatacatgatagcgagagtcaggtacgcgatgttttacaagacttgctcaagcaaaaagcgcagctgttgacggaaggaattgttgctagcagaaatggccgtcaggttttaccagtcaaaaacacctaccgcaataagattgcaggtgtcgttcatgatatttctgctagtggaaacaccgtctatatcgaaccccgtgaggtagtcaaactgagcgaagaaattgctagtctgcgagcagatgagcgctatgaaatgcttcgcattctccaagaaatttctgagcgtgtccgccctcatgcggctgagattgctaatgacgcttggattatcggtcatctggacttgattcgtgccaaggttcgatttatccaagaaagacaagcagtcgtgcctcagctgtcagaaaatcaagagattcaactgctccatgtctgccatcctttggtcaaaaatgccgtcgcaaatgatgtctattttggtcaagatttaacagctattgtcattacaggtcccaatacaggtgggaagaccatcatgctcaaaactctgggcttgacacaggtcatggcccagtcaggattgccgattttagcagacaagggaagtcgtgttggtatttttgaagaaatctttgctgatattggagatgagcagtctattgagcagagcttgtctaccttctctagtcatatgaccaatatcgtggatattcttggcaaggtcaaccaacattcactcttacttttggatgagttgggggctggtactgatccccaagagggagcagcccttgccatggctattctggaggaccttcgcctgcgtcaaatcaagaccatggcgacgacccactatccagaactcaaggcctacggtattgagacagcctttgtgcaaaatgccagtatggagtttgatactgcaactcttcgcccgacctatcgctttatgcagggtgttcctggccgaagtaatgcctttgaaattgccaaacgtctaggcctatctgaagttatcgtaggagatgccagtcagcagatcgatcaggacaatgacgtcaatcgtatcattgagcaattagaagagcagacgctggaaagccgcaaacgtttggacaatatccgtgaggtggagcaagaaaatctcaagatgaaccgtgcgctaaaaaaactctacaacgagcttaatcgtgaaaaggaaaccgagcttaacaaggcgcgtgaacaggctgctgagattgtggatatggccctaagtgaaagtgaccagattctcaaaaatctccacagtaaatcccaactcaagccccacgaaatcattgaagccaaggccaagttgaaaaaattggctcctgaaaaagtggacttgtctaaaaataaggtccttcaaaaggccaagaaaaaacgagctccaaaggtgggagatgatatcgtggttctcagttatggtcagcgtggtaccttgaccagtcaactcaaggacggtcgctgggaagcccaagttggcttgattaagatgaccttggaagagaaagagtttgatcttgttcaagcccagcaagaaaaaccagtcaagaagaaacaggtcaatgttgtgaaacgaacttctgggcgaggacctcaagctagactggatcttcgaggcaagcgctatgaagaagccatgaatgagctagataccttcatcgaccaagccttgcttaacaatatggctcaagttgatatcatccatggtatcggaacaggagtcatccgtgaaggagttaccaaatacttgcaaagaaacaaacatgtcaagagtttcggctatgccccacaaaatgctggaggcagtggtgcgactattgtcacttttaaaggatagcagtattctggactttataaagtaaaaactgttgaactaatttttactaataaacacattgacaaaagccaacattttttgtaaaattagaatcaattaaataccaacaccgaatgaagtttaatagaagtggggaatcgtttgattttccatgactgtaaatggacggaactctggagagaccgtaaaggcaccgaaggggcaaggcaggcaactgctcaaactctcaggtaaaaggacagagctaggatagaccgctttttagcatttatctaagcattccagagtacatgtatcttgcatgtgctctttcttttggggttgaaacgataggagaaggaaatgttagaattgcttaaatcaatcgatgcttttgcttggggaccgcccctcttgattttattggtcggaacagggatttacctaactattcggctaggactcttgcaggttttgcgtctacccaaggcctttcagcttatttttatccaggataagggacatggtgatgtatccagttttgcagctctgtgtacagccttggcatcaactgttggaacaggaaatatcataggagttgcgacggctatcaaggttggtggaccaggagctctattttggatgtggatggcggctttctttggaatggctaccaagtatgcggaaggactcttggccatcaaataccgcaccaaggacgaccatggtgcagtagcgggaggtcccatgcattatatccttctagggatgggagaaaagtggcgaccacttgctgttttgtttgcagtagcaggagtattggttgctctcttgggaatcggaaccttcacccaagtcaactcgattgcagaatctatccaaaatacaacgacgatttcgccagccatcacagctctcgtcttgtctgtctttgtagcgattgcagtctttggtggactcaagtctatttctaaggtttcaactactgttgttccttttatggccatcatttatatcttaggaactcttacagttattttctttaatatcggaaaaatccctggcacaatcgctttagtctttacctcagcttttagtccccttgctgcggtaggtggatttgctggtgctagcgttcggatggctattcaaaatggtgtggcgcgtggtgtgttctcaaacgaatctggtctgggttctgctcctattgcagctgcagctgccaagacaaatgaaccagtagagcaaggtttgatttccatgacaggaacctttattgataccctcatcatttgtactctaactggtttgaccatcttggtaactggagtttggagcggtgacttgaatggggttgccttgactcagtcagctttctcaacaaacttttcacactttgggcctgctctcttgaccatcttccttgtactttttgcctttacaacgattctaggttggaactattacggagaacgctgttttgagttcctctttggggttcgctttatctggctctaccgtgtggtttttgtgctcatggtcttgttaggaggatttatcgagttggatatggtctggattatcgcagatatcgttaacgccttgatggctctgccaaacttgattgccctcttggtcttgtcgccagtcgttattgctgaaactaaaaagtattttgacaaataatggaatcacacagctcgtgtgatttttttgcctataaataatttttatcagcctgatatataatatatattatacaagtgattggaagtgtgataaactaatataacaacgaaaatcttatgagagaataaagctttatcttagataaacttaggaatcaggattttataagattttccaataatattagtgtcaataataagaaaagaggtatcttatgacaacatttactatccatacagtagagtcagcaccagcagaagtgaaagaaattcttgaaacagtagaaaaagacaacaatggctatattcccaacctaatcggtctcttggccaatgccccgactgttttagaagcctaccaaattgtctcatctatccaccgtcgcaacagcctgacacccgttgagcgtgaagtggtgcaaatcacggcagccgtgaccaatggttgtgccttctgtgtcgcaggtcacacagccttttccatcaaacaaatccagatgaatgatgacttgattcaagctcttcgcaatcgtactccaattgaaacagatcctaaattggataccctagctaagtttaccttggcagttatcaataccaagggtcgtgtaggagatgaagccttgtctgagtttttagaagctggctacactcaacaaaatgccttggatgtggtttttggtgtcagcctagcaatcctctgtaactatgccaacaacttagctaatacaccaattaatccagaattgcaaccttatgcctaattcatatctgagtaaaatgaagtctgaaataagcggacttcgtttttttaaatcctcatttaagcgcttttatgttatactgaaactaacatgattattggaggttaggatgaaaaaactccccttagtattttcaggttgtttgctaggtttggcaggagctggaaatcttattttagatacgttgccggttctatcccatctttttagtctgattggtttggttttatggatttactttctaattctgcatctctttaattggaaagaaaccaagcaagaattgaccaagccccctcttttgtcaggaatggcaacctttcctatggctgggatgattttatcgacctatgtctttcgcgtattctcttatcttcctttggtagcacaagggatttggtggttttcatttctcttggatttgaccttgattgctggttttaccatcaagtttgcttgtccagggcggagggttcatgccactccaagctggacggttctctatgtggggatagcagtggctgccttgacctatcctctggtaggtattatcgaaattgcctatgcgaccttgagttttggttttctcttgaccttctatctctatccccttatttatagcgatttaaagaaacatccactcccactagccttgcttggacaagaaggaatctactgtgctcctttctctctactcttggcttctctagttcgagtaggaggaaccagcctgccgacttgggtcttgattgtcatgattttggcttctcaatccttctttttctttgttttaactcgtctgcccaacattttaaaacaaggttttcaaccagccttctcagccctcaccttcccaaccattatcacagcgacctcgctcaagatggctcagggaattttgaaacttccatttctggattacctggtattggctgaaaccattatatgcctaactattttattctttgtactaggtgcttatctgatttggttacgaaaaaaggtctagctagaaatagctaaaccttattttttatggtttgatgacttcagctccacccatgtatggacgaagtgcttctgggatggtcacagaaccatcttcattttggtaattttcaagaattgcagccactgtacgtccaactgcaagtccagaaccgttcaaggtatgaaggagtttcaccttgccatctgcttcatcacggtaacggatttgggcacgacgggcttggaaatcttctgtgtttgaacagcttgagatttcacggtaattgttttgtgctggaatccacacttccaagtcgtaagtcttcgcagctgagaagcccatatctccagtagagagagcaacgacacggtatggaaggttgagtttttgaagaatgttttcagcgttggctgtcattttttccaattcttcgtaagattcttctggtttggcaaatttgaccatttcaaccttgtggaattggtgcaaacggatcaagccacgcgtatcacgaccggcagaaccagcctcagaacggaatgacggactcatggcagtgaagtagattggaagatctttgccgtctaagatttcatcacggtagtagtttgtcagaggaacttcagcagttggaatcaagacaaagttggtatcgctgagttcaaaagtatcttccttaaattttggatactgaccagtaccaaacatagaatcatggttgactatgtaaggtgtgatgacttcagtatagccttcttttccatgttcatccaacataaagttgtagatagcacgttccaaacgagcaccgaggcctttatagaagaggaagcgagcgcctgttaccttaccaccgcgttcccagtcaaggataccaaggtcttcaccgagatcccagtgagctttaggttcgaagtcaaactcgcgtggagtaccccaacggcgaacttccacattgtcgtcttcgtcagccccaacaggaacgctgtcagctgggatatttggaagagtcgttgtaaattctgtcaatttagcatcgatttctgccaattcagcatccaaggctttaacctcagcagatagattttgcatggcagcaatcttgtcatctgtattttccttgttgcgcttagcttgggcaatctcagcagaaactgtgttacgttctgctttgagagtttcaaccttgaccaagatgttacgacgtttagcatcgatttctttcatttcattcaagacagcagcatctacaccacgtgtagctaatttttctgcgacagcttcaaaatctgtacgaatacgtttgatatctaacataagaactcctttatgaaaaaagcaccctgacaaaacgttggagtggcagggccacggttccatccaacttcacaggtgtgcacttgattgtgtatgtaattgtcactaacggtagaatttcacctatccctcctatctgctcgcagtacccgcagactttctgaaagaagaagataacctacttatccgttgctatgattatactaaagtttctacttttttgcaaatagatttttaaatttttggctaattgtctgaatcagggtcggaagtttgacgaccttgtcattgcctagtttttcgcgtgcaattttgagaatggcacctgagtcttttgaagcaaagaggaattttcctttgtctgtaaagacttcgaagtggcggctgattttgcgtccagtgacattggctccaatctgattgatatggctccaaggaatctggataaattgttcgacattgacatctgggtaaaattccaaagcctgatctccgacaaggaatttcccaactttcccagcgatagagaggtaggaagtgcctgtcgtactgaggagtactgttttgttaagtgattgggccatgcttagtcttccttactttctccaaaaaaggcattgtagagggctttaattgctgctttctcttggtctttattgacaacaaacataatagaaacttcactagaaccttgagacatcatctggatgttgattttgttttcagatagagcgcgtgtcgcagtagcagtcactccgatatggctcttcattttttcaccaacaatcataatgatagaaaggtcgtgttcgatttctgcatgatctactttagccttttgaaccaactgacgcaggatttcttcttccttgatgggagttagttggcgagaacggagaatgatagaaagatcgtcgatacctgttggcatatgttcccaaccgatgttaagttcttccaggatttgcagaaccttgcggccaaatccaacctcacggttcatgaggtatttcgacatgttaatgctgacaaagcctgagtcaccagcaattcccacaactggaaattcatcattactgtgttttagaacgatacgagtacctggatggtcagggttgttggtattcttgataaccagaggaatttttccacggtaggcaggaagaagagcctcgtcatgaaggactgagaagcctgcataggccaactcgcgcatttcacggtaggtcaactcaggaatcgagtgtggttggtggataataccagggtgggctgcaaagataccatcaacgtccgtaaagttttcatagaggtcagctttgacaccagcagcaatgatagaacctgtaatatcagaacctccacgtgagaaagtacagatttgattttccttagtgacaccaaagaaaccaggaatgacaaggacttcattggtgtttgtcaattcttcaatcttgtcataacttgatggaatgatgcgagcgtgaccaggttcacttgtgaccacaatcccagcttctctagggtgcatatagcgtgcatcgataccattttggttaaagtaggcagcaatcaatttggcattgttattttcaccggctgctaggaaagtatcgtagagaaattcattttcttcaataggaagagtggccaaggcgtgaatgcttttagaaattttttctagcacagctggttttagtcccaattcactaaccatagcagcatagcggtcgataatccagctttggttcttgctaatatcgttacccgcaacatagtcgcggtagtatttaatcagggcatccgtaaccttagtatcttcagcattgcgtttaccaggcgcagaaacgactacaaaacgacgctctgaatcgcttttgacgatgtttaaaactttttctaattgactagcagaggcaagagaactacctccaaatttaacaactttcataagaactcctaaagtaagtattttatacgattatagcagaaagaaaggcttttttcaatgaagaaaataagatgctttctagcctaaagcgagcctttcttatcggctgagacactttcagtcgattttttcttgctttctgctcctaaaaaagatatactttgacagtgaaataatttaacactcaatgaaaatcaaagagcaaactaagaagctagacgaagtcagctcaaaatactgttttgaggttgcagatggaagctgacgcggtttaaagagattttcgaagagtataaactgcttataaaataaaaaggagccctgatggaacacattatttatcaacttgaagaggacttggcaatccttaccttgaaccgtcctgaggtcgcaaatggttttcatattcccatgtgtgaggagattttagaagctctgactttggcagaagaaaatccagctgtgcattttatcttaatcaatgccaatggaaaggtcttctcagttgggggagatttggtagagatgaagcgggcagtggatgaggatgatattccatcattgacaaaaatcgcagagttggtcaatacgatttcttataaaatcaagcaaatagccaaacctgttttaatggaagttgacggtgctgttgcaggtgccgcagcgaatatggctgttgcggcagatttctgtttggcgacggataaggctaagtttatccaagcctttgttggtgttggtttggctccagatgcaggggggattcatctcttgagccgcagtatcggtgtgacgcgtgctgctcaattagctatgacaggagaggctttaacggcagaaaaagccctagaatgggggttggtttaccgcgtttctgaagctgaaaaacttgaaaagacgagagaacagcttcttaaaaaattaagacgtgcttcaagtaattcctatgctgccattaagaagttggtttgggagagccaatttaaagactggcagggttacgctactttagaactgaacctacagaaatccttagctcaaacagaggatttcaaagaaggagtgcgagctcattcggagagaagaagacctaaatttacaggaaaataaaaaatacttgcatcattctttgaattttgatataattctttctgtcaaatgttttgattgtaaaagttttttgaagaaggagggatatgaaaaatggactaccaacgaatcaatgaatatttaacatctatatttaacaatgtccttgtaattgaggaagtgaacttgagaggtagtcgttttaaggatatctccatcaaagaaatgcatacgattgatgtcatcggtaaggctccagacgtgactccaagtcaagtgtcaaaagagttgatggtaactcttggaactgttacgacaagtttgaacaatttagagcgtaagggctacattgagcgagttcggtcagaacaggatcgtcgtgtggtgcatctgcatttgacaaagaagggtcgcttgattcatagactgcataaacgcttccacaaggccatggtagaaaaaattattgatggcatgagcgaggaagaaattgctgtcatgggtaaaggtttgactaatctttaccaatttttggaggatttgaaataatggcttttgcaaaaataagtcaggttgctcattatgtgccagagcaagtggttacaaatcacgacttggctcagattatggataccaatgatgagtggatttcaagtcgaacgggaatacgacaaaggcatatttcaagaacagaatctaccagtgatttggctacagaggttgctaagaaactgatggcaaaagctggaataacaggagaagaactggattttatcatcctagctaccattactccagattcgatgatgccctctacagctgctcgtgttcaagctaatattggtgctaataaagcctttgcttttgacttaaccgcggcttgcagtggatttgtatttgctctttcaactgctgaaaagtttatcgcttctggtcgctttcaaaaaggcttggtgattggtagtgaaaccctctctaaggcagtcgattggtcggatcgatcaacagctgtgttgtttggagatggtgctggtggtgtcttgttagaagctagcgagcaagagcatttcttagctgagagtctcaatagcgatggaagtcgcagcgagtgtttaacttatgggcattcaggtttacattctccattttcagatcaagaaagtgcagattcgtttttgaagatggatggacgcacagtctttgattttgccattcgagatgtagccaagtctatcaagcagactattgatgaatctcctatagaggtgacagacttggattatctgctacttcatcaagccaatgaccgtattttggataagatggctagaaaaattggtgttgaccgagccaaacttccagccaatatgatggaatatggcaataccagtgcagccagtatcccgattttactttcagagtgtgtagaacaaggtctcatccctttagatggtagccagactgttcttctatcaggcttcggtggaggcttgacctggggcacgctcattcttacaatttaggtaatcatgtggtgaacacattgttataaaaaaactatttattttaaaggagtcctatcatggcagtatttgaaaaagtacaagaaattatcgttgaagaacttggaaaagacgcatcagaagtaacacttgaatcaacttttgatgatttggacgcagattcattggacttgttccaagtaatctcagaaatcgaagatgcttttgatatccaaatcgaagcagaaaatgacttgaaaacagttggtgacttggttgcttacgttgaagagcaagcaaaataagcagaatattagtagaaggagtagggagaaacccactccctcttgtttaggtaatagtttgactgtcaaattatggtgaaatcgaactattacgtaagcaaggaaggttggaggcactatgaaaacgcgtattacagaattattgaagattgattatcctattttccaaggagggatggcctgggttgctgatggtgatttggcaggggctgtttccaaggctggaggattaggaattatcggtgggggaaatgccccgaaagaagttgtcaaggccaatattgataaaatcaaatcattgactgataaaccctttggggtcaacatcatgctcttatctccctttgtggaagacatcgtggatctcgttattgaagaaggtgttaaagttgtcacaacaggagcaggaaatccaagcaagtatatggaacgtttccatgaagctgggataatcgttattcctgttgttcctagtgtcgctttagctaaacgcatggaaaaaatcggtgcagacgctgttattgcagaaggaatggaagctggggggcatatcggtaaattaacaaccatgaccttggtgcgacaggtagccacagctatatctattcctgttattgctgcaggaggaattgcggatggtgaaggtgctgcggctggctttatgctaggtgcagaggctgtacaggtggggacacggtttgtagttgcaaaagagtcgaatgcccatccaaactacaaggagaaaattttaaaagcaagggatattgatactacgatttcagctcagcactttggtcatgctgttcgtgctattaaaaatcagttgactagagattttgaactggctgaaaaagatgcctttaagcaagaagatcctgatttagaaatctttgaacaaatgggagcaggtgctctagccaaagcagttgttcacggtgatgtggatggtggctctgttatggcaggtcaaatcgcagggcttgtttctaaagaagaaacagctgaagaaatcctaaaagatttgtattacggagccgctaagaaaattcaagaagaagcctctcgctggacaggagttgtaagaaatgactaaaacagcctttttatttgctggtcaaggtgcccagtatctagggatgggacgggatttctatgatcagtatccgattgttaaagaaacgattgatcgagcgagccaggtgctcggttatgatttgcgttatctcatcgatacggaagaagacaaactcaatcagacccgctatacgcaaccagccattctagcgacttcggttgctatctaccgtttattgcaagaaaagggctatcagcctgatatggttgctggtttgtctcttggagaatactctgccttggtggcaagtggcgccttggattttgaagatgcggttgccttggtagctaagcgtggagcctatatggaagaagcggctcctgctgactctggcaagatggtagcagttctcaatacgccagtagaggtcattgaagaagcctgtcaaaaagcttctgaacttggagtggttactccagccaactataacacacctgcacaaatcgtcattgctggagaagtggttgcagttgatcgagcggttgaacttttgcaagaagcaggtgccaaacgcttgattcctcttaaggtgtcaggtccctttcacaccgctctccttgaacctgctagccagaaactagctgaaactctagctcaggtaagtttttcagattttacttgtcccctagtcggcaatacagaagctgctgtgatgcaaaaagaggacattgctcagctcttgacgcgtcaggtcaaggaacccgttcgtttctatgaaagtattggggtcatgcaagaagcaggcataagcaactttatcgagattggaccggggaaagtcttgtcaggttttgttaaaaaaattgatcaaactgctcacttagctcatgtggaagatcaagcgagtttagtagcacttttagaaaaatagactaaaataagtagaagttttgaaaggaaaaaaatgaaactagaacataaaaatatctttattacaggttcgagtcgtggaattggtcttgccatcgcccacaagtttgctcaagcaggagccaacattgtcttaaacagtcgtggggcaatctcagaagaattgctcgctgagttttcaaactatggtatcaaggtggttcccatttcaggagatgtatcagattttgcagacgctaagcgtatgattgatcaagctattgcagaactgggttcagtagatgttttggtcaacaatgcagggattacccaagatactcttatgctcaagatgacagaagcagattttgaaaaagtgctcaaggtcaatctgactggtgcctttaatatgacacaatcagtcttgaaaccgatgatgaaagccagagaaggtgctatcattaatatgtctagtgttgttggtttgatggggaatattggtcaagctaattatgctgcttctaaggctggcttgattggctttaccaagtctgtggcacgcgaggtcgctagtcggaatatacgagtcaatgtgattgctccaggaatgattgagtctgatatgaccgctatcctgtcagataagattaaggaagctacactagctcagattccgatgaaagaatttgggcaggcagagcaggttgcagatttgacagtatttttagcaggccaagattatctaactggacaagtggttgccattgatggtggcttaagtatgtagcgaaagctagaggtgaaaagaatgaaactaaatcgagtagtggtaacaggttatggagtaacatctccaatcggaaatacaccagaagaattttggaatagtttagcaactgggaaaatcggcattggtggcattacaaaatttgatcatagtgactttgatgtgcataatgcggcagaaatccaagattttccgttcgataaatactttgtaaaaaaagataccaaccgttttgataactattctttatatgccttgtatgcagcccaagaggctgtaaatcatgccaatcttgatgtagaggctcttaatagggatcgttttggtgttatcgttgcatctggtattggtggaatcaaggaaattgaagatcaggtacttcgccttcatgaaaaaggacccaaacgtgtcaaaccaatgactcttccaaaagctttaccaaatatggcttctgggaatgtagccatgcgttttggtgcaaacggtgtttgtaaatctatcaatactgcctgctcttcatcaaatgatgcgattggggatgccttccgctccattaagtttggtttccaagatgtgatgttggtgggaggaacagaagcttctatcacaccttttgccatcgctggtttccaagccttaacagctctctctactacagaggatccaactcgtgcttcgatcccatttgataaggatcgcaatgggtttgttatgggtgaaggttcagggatgttggttctagaaagtcttgaacacgctgaaaaacgtggagctactatcctggctgaagtggttggttacggaaatacttgtgatgcctaccacatgacttctccacatccagaaggtcagggagctatcaaggccatcaaactagccttggaagaagctgagatttctccagagcaagtagcctatgtcaatgctcacggaacgtcaactcctgccaatgaaaaaggagaaagtggtgctatcgtagctgttcttggtaaggaagtacctgtatcatcaaccaagtcttttacaggacatttgctgggggctgcgggtgcagtagaagctatcgtcaccatcgaagctatgcgtcataactttgtaccaatgacagctgggacaagtgaagtatcagattatatcgaagctaatgtcgtttatggacaaggcttggagaaagaaattccatacgctatttcaaatacttttggttttggaggccacaatgcagttcttgctttcaaacgttgggagaatagataagtatgaatttaaacgatattaaagacttgatgactcaatttgaccagtcaagtttgagagaattttcttataaaaatgggacggatgagttgcagtttagcaagaatgaagcaagacctgtgcctgaagttgcaactcaagtcgctccagcacccgttctagcaacaccgagtccagtagctcctacatctgctccagcagagactgtagcagaagaagttccagctccagctgaagcaagtgtggctactgagggaaatcttgtagagagtccacttgttggagtggtttacttggctgctggaccagataaacctgccttcgttacagttggtgatagtgtcaaaaaaggtcaaacattggtaattatcgaagccatgaaagtcatgaatgaaatcccagctcctaaggatggtgtggtaacggaaattctcgtctctaacgaagaaatggttgagtttggtaaaggattggtacgtatcaaatgatcgatattcaaggaatcaaagaagctcttccccaccgttatcctatgcttctagtggaccgtgtcttggaagtgagcgaggataccattgttgctatcaaaaatgtgaccatcaacgagcctttctttaacggccactttcctcaatacccagttatgccaggtgttgtgattatggaagccttggcgcaaactgccggtgtgttggagttatcaaaacctgaaaataaaggaaaactggtcttttacgctggtatggacaaggttaagttcaagaagcaagttgtaccaggcgaccaattggttatgacagcgacttttgtaaaacgtcgtggcaccatagctgtggttgaagcaaaggctgaagtggatggcaagcttgcagccagtggtacccttacttttgcaattgggaactaaggaggttctccatgtttcgaaaaattttaattgccaatcgtggtgaaattgcggttcgtattatccgtgcggcacgtgaattggggattgcgacggtagcggtttattcaactgctgataaggaagctcttcatacgcttttggcagatgaagcagtttgtattggtcctggcaaggcaacagagtcttatctcaatattaatgcagttctatcagctgcagtcttgactgaggcagaagctattcaccctggttttggatttctcagtgaaaattccaaatttgcgaccatgtgtgaagaagtaggtatcaagtttatcggtccatctggtcatgttatggatatgatgggggataagatcaatgcgcgtgctcagatgattaaagcaggtgtgcctgttataccaggttcagatggagaagtgcataactctgaagaagctttgattgttgctgaaaaaattggctatcctgttatgctcaaggcttcagcaggtggaggtggtaaagggattcgtaaggttgaaaaaccagatgacctcgtttctgcctttgaaactgcctctagtgaggccaaggccaattatggcaatggtgccatgtacatagaacgggttatctatccagctcggcacattgaggttcaaatcctaggtgatgagcatggacatgtgattcacttgggtgaacgggattgttctcttcaaaggaataaccaaaaggttttggaagaaagtccctcgattgcaatcggaaaaacgctgcgtcatgaaataggtgctgctgctgttcgagcggcagagtttgttggctatgagaatgcaggaaccattgaatttcttcttgatgaagcaagtagcaatttctatttcatggagatgaatactcgtgttcaggtagaacatccagtaacagagtttgtttcaggtgttgatatcgttaaggaacagatttgcattgcggcaggtcagcctttgtctgttaagcaagaagatattgtcctacgcggtcatgccatcgagtgtcgtatcaatgcagaaaacccagcctttaactttgctccaagtccaggtaagattactaatctctatctgccaagtggtggagttggcttgcgcgtggattcagcagtttatccaggttataccattccgccttattatgatagtatgattgccaaaatcatagtacacggcgaaaatcgttttgacgccttgatgaaaatgcaacgtgccctctatgaattagaaattgaaggagtgcagaccaatgcagatttccagcttgacctcatttcagatcgcaatgtcattgctggggattatgatacttccttcttgatggaaaccttcttacctaaatatcaagaaaaagaataaaatgactttaagagtttaaaccgaaaaggggaatcaatggctctatttagtaaaaaagataagtatattcgaatcaatcccaatcgttcggttagggaaaaacctcaagctaagccagaggttccagatgaattattttcccagtgtccaggctgtaagcataccatctatcagaaggatctgggaagtgaacgtatctgtccgcactgtagctatacctttcgtatttctgcccaagaacgcttggctttgacgattgatatgggaaccttcaaagaattgtttacagggattgaaagcaaggatcccttgcatttccctggttaccaaaagaaactggcatctatgcgtgaaaaaacaggtctgcatgaagccgttgtgacaggaactgctcttattaaaggtcagactgtggctcttgggattatggattctaactttatcatggcttctatgggtacggttgtaggtgaaaaaatcactcgtttgtttgagtatgcgactgtcgaaaaattgccagttgtcctattcacagcctctggtggagcccgtatgcaggaaggaatcatgagtctcatgcagatggctaagatctctgcggcggttaaacgccattcaaatgctggtctcttttacctgaccattttgacagatccaacgactggtggtgtgacagcttctttcgctatggaaggcgatatcattctggctgaaccacagagcttggttggttttgctgggcgtcgtgtgattgaaaatacggttcgtgaaagcttgcctgaggatttccaaaaggcagaattcctattagaacatggctttgtggatgctattgtcaaaagaagagacttaccagatacgattgctagcctagtcagattgcatggagggagtcctagatgaatattgcaaaaatagtcagagaagcgcgtgagcagagtcgcttgacaaccttggactttgcgacaggcatttttgatgaatttatccaattacatggtgaccgttcttttcgtgatgatggtgcagttgttggtggtattggttggcttggagaccaagctgtaacagtggttggtatccaaaaaggcaagagtttgcaagacaacctcaaacggaattttggccaaccacatccagaaggctaccgaaaggcactgcggttgatgaaacaggctgagaaatttggccgtccagttgtgacctttatcaatacagcaggtgcttatcctggtgtcggagcggaagaacgtggtcaaggggaagctatcgctcgcaatctcatggaaatgagtgacctgaaagttcctattatcgccattattatcggtgaaggtggttcaggcggggctctggctctagctgtcgcggaccgtgtctggatgctggaaaattctatctatgccattctcagtccagaaggctttgcttccattttatggaaggacggtactcgcgctatggaagcagcagaactgatgaaaatcacttcgcatgaactgttagaaatggacgtggtggataaggtgatttctgaaataggactttctagtaaagaactgattaagagtgtcaaaaaagaactccaaacggagctggctagactttcacaaaaaccgctagaagagttgctggaagaacgctatcaacgatttagaaaatactaagaatgactaaatgagactagaaaggtctcattttttatggaaaaatgtaattcaggtcgaaaaattgccagttgaggagatgggctataaaatagacaaaaaaagaaatatactataaatgtgagcctacaacaatctattttaagaaggtacttgcaatgacaggtacaaatacatttacagttctttcaactgaggacttggagcaaacttcaggtggtcttgctgtttgggaagatggatatagtagatggttatattatagagaatttgctccctatatgaggcaaggggcacttaattcttatatagatgcttggaagtacggcttccgagcagggtaatctttcaaaaaagtacgatgagaaacacaaaaaaactaagacaatttggaatatttttgcttattattttactatctacctatttaccacaaacaattggattgtatgtgacgatcattttagggttaggagctgatgtctattctcttattttaacaatgggattagtgggaagtttccttctattaatttggaggttaaaaaagaaaaagatgctctttatctttgagaaaaagagctggaactggtcatttgtcttctacttatttgcaacttatgtggtttatcagattctcggtaatttttgggcacgctatgctcatttgattaatcataggaatattcatgatgagtattttaccgtgcttttttcaaatggacaaccaacctttttatcgactatcttatcttttgtcctgcctgtaatcatcggtcctgtttttgaggagactcttgatagagggtattttatgaataccttctttccctagtccaagtactatttggatgttatcctatctgctatcatctttgggattagccatttgatactatctcacagagatccaattagtttattatattatagtctgattggtttcttttttgcccttgtttatcgttctaccgacaatctgagattaacgattctctgccatagtttttttaactttctcaatcatgcaaaacctatctggatttttgtttacaattatatctattatcatttttttagatagtgggaggcaaagaaaaaagtgtttgatatctatcaaacactttttctttttattgttggctctataatatttgtagtgggtaaatcccctatagatattatggagcctattttattgtagaaaaaaagtcccatatgacctataatgaaaagcgacaaaacaactcattagaaagattcatatggaacaattacattttatcacaaaattactagacattaaagaccctaatatccagattttagacatcatcaataaggatacacacaaggaaatcatcgccaaactggactacgacgccccatcttgccctgagtgcggaaaccaattgaagaaatatgactttcaaaaaccttctaaaattccttatcttgaaacgactggtatgcctactagaattctccttagaaagcgtcgattcaagtgctatcactgttcaaaaatgatggtcgctgaaacttctatcgtcaagaaaaatcaccaaatccctcgtatcatcaaccaaaagattgctcaaaagttgattgaaaagatttctatgactgatattgcccatcagctttccatctcaacttcaactgttattcgtaagctcaatgattttcactttaaacatgatttttcttgtcttcctgagattatgtcttgggatgagtatgcttttacaaagggaaagatgagcttcattgcgcaagattttaacaatctcaatatcatcactgttcttgagggtagaacacaagctatcattcgaaatcactttcttcgctacgatagagttgtccgatgtcgcgtcaaaattattactatggatatgtttagcccttactatgacttggctaaacagcttcgctttcaaattcctaggctcaggctgaaacagtctcccagactgtttcactcccgaatgctaaaatcgttcttgatcgctttcacattgtacaacatcttagccgtgccatgagtcgtgtgcgtgtccaaatcatgaatcagtttcatcgaaaatcccatgaatacaaggatatcaagcgctactggaaactcattcaacaggatagccgtagactgagtgataagcgattttatcgtcctacttttcgtatgcacttaaccaataaagagattttagacaagcttttgagccattcacaagacttgaaacaccactatcagctctatcagctcttgctgtttcacttccagaataaggaaccagagaaatttttcggacttattgaggacaatcttaagcaggctcatcctatttttcagactgtctttaaaaccttcctcaaagataaagaaaagattgtcaacgcccttcaactacactattctaatgccaaactggaagcgaccaataatctcatcaaacttatcaagcgcaatgcctttggttttcgaaactttgaaaacttcaaaaaacggatttttatcgctttgaacatcaaaaaagaaaggacgaaatttgtcctttctcgagcttagctttttttcaacccactacagttgacaaagagccttattgttcttctgttacaaactggctgagcagtccattgataaaacgggcagatttttgatcggagaagtcctttgcaagctcgatagcttcattaacagcaaccagctgaggagtgtcaaatgaagtgatttcaaagactcccaagcgaaggaggtttctctccacgagcgttaagcgttcaatggtccaacctgcttttaaatgctgagtgatttgcttatctagttcttcctttttagcttgaacaccagaaacgaggtctatcaaaaaggctggaagttgtacatccgtatcttcacgatcatgagtataggcgaaacgacaagcagtttcgacatccgtaccgaactcaaggctcatgagagcttgaaaagcgcatttacggagttggcgtctagattctaatagtggactagtcattgaggaagtcctcgtcaaatagatctttcaattctggttttggtgttttatctgggacgatacctgcaacgtgaatattgatagcagcgagttctacatcagccatattacggacggcatctttgacagctttctggatagcaaccgctaccttaggaacttttactccgtactcaaggtagagatagatatctgctgtgagttcttcgtccacgtttttaagataaatgccacggccgagtgaaagttttgaaagggtatcagacactgatctgtttgaaaaagagtgaacaccctctacctttgcagtagcgatagcaatgattttttcaagtacacgtggggcgataacgatttcgccaagttgttcttcaattcccatagaatgacctctttctagagattaggcacgagaaacgtaagttccttctgcagtgttgataacgagtttttgtcctgcttcgatgaagtctggaacgtttacgacaagtccagtttccatcgttgctggtttaccagaacctgtaacagtagcacctttgatagatggttgagtttcagcaactgtcaactcaacagtagtaggaacggtgacaccgatcacttcagttccgtagaattggattttcacatcagagttttcaaggatgtaaagcaattcgttttcaacattgactacagggatttcgtattggtcataagtttctgtattcatgaagtatgctgtgtcatccattttgtacaagtattgagctgggacagtctcgataatagcttgttcaaatttttcctctggacggtagcttgtgtcaaatgtagaaccagtacggacatcacgcaatttcatacgcatgatcgtgtttcctttacctggtttgtggtgactagcttccaaaacgcgaatcaatttgccgtcagctgtttcaaaggtcataccagcttttaatttacttgcttcaatcatgtttttacctctttaataaatattattactcttcattttaccataaaatactctggaaataaagccaaaatagttattgggagttggtagagaagaaaaaaccaaccttagggctggttttgttctgtctagttttctttcaacttcgccaattcctgtgcaagtagtttaagggcaacttgtgggttggcttggcctttggttgccttcataaggaatcctgtaaaggccttgtcggcgttacgtttgcctgacttgaagtcggcaacagcagcttcgttatcggcaaagacttggtggatgattgggatcaagatagctggatctgaaatttgaaccatacctgctttttccacgtattcacgcgcgccaccgccatttttagctagatggacaaagactttcttggcaatcttagatgaaatagtaccgtcttcgatgatggcaatcatttcaaccaagttttctggtgtcaattcgatttgttccagtgttttaccttcagcattcaagaactgagcgacttccccttggagccagttagagacttgtttggcatcaccacctagggcaacagctttttcaaagaagtcagaagtgactttattagcagtcaactgactagcatcgtagtctgataaaccaaggtcagatacataacgcgcacgacgttcttttggaaactctggcaactcagtccgcatttcctcaatccactcgtcagaaatttcaaagaggggtaggtctggttctgggaagtagcggtagtcagcagccccttccttgacacgcatgaggatggttgctttattcgcttcatcgtaacggcgtgtttcttggcggatttgaccacctgagcgaagaatttcagcctggcgttggacttcgtattcaagacctttacgaacgtttgagaaggagttgaggttcttcaattcagtcttggtaccgaatttctcttgaccataaggacgaagggagatgttggcatccacacgcatcgaaccttcctccatcttaacgtcagaaatgccagcgtactggataacttccttgagggctgtcagataagcataggcttcttcaggagaacgcatatctgcctcagatacaatctcaatcaagggaaccccttggcggttgaggtcaacataagagtagccatctgtaccatgggtgtttttaccagcgtcttcctctaggtgggcacgttcgataccgattttcttggtcgtaccgtcttctagtttgacttcaatccagccattatatccgattggttcatcaaactgagaaatttggtaggctttggggttatcaggatagaagtagttcttgcggtcaaagtgcatctttttgtggatgtccatgttgagggcaagagcagccttgataccggcatcaacaacccctttattgagaactggtagaactcctgggaaagaccagtcaatcacgttagtgttggcattttggtcatttccaaagtgggcagaagtaggtgagaagatttttgaattggtgttgagctctacgtggacttcaagtccgatgactgtttcaaagttcattagttgtcacctccaaaaatcacgggttgttgtttgtggtagtctgttgttgcttcaaaagcagcagcagcttggtaaatggtttcctcagagtacttgggaccaatcaattggagtccgacaggtagaccttgagagaatccagcaggaatcgaaattccaggcagtcctgccaagtttacaggtatggtcaataggtcggctaagtacatggcaactgggtcatggttgagagaatccaagtcataggcaacacttggagcagttggacccaaaatcaaatcgtaatccgcgaagactttttcgaaatcttgaatgatgagggtacggacttgaccagcctttttgtagtaggcatcatagtaacctgatgaaagactgaaagtacccagcatgatacgacgttttacctcttcaccaaaaccttggcttcggctgtttacatagatttcatcaaggttggttgcatcttctgcgcgatagccgtaacggataccgtcgaagcgttgcaagtttgatgaagcttctgatgaagcgatgatgtaataaacggcaacaccgtatttagagtgaggaaggctgacttcttcgacgatagcacccaatttttcaaagtgtttggccgcgtttaagattgtttccttaacctctggatcaattccttcgcctaggtattccttaggcaaagcgattttcatacccttgatgtcttggccgatttttgaagtaaagtcggcgatgcggacaggagcagaagtagagtctttagcatcttcgctggcaatagcgttgagcaagagggcattttccttaacagtaggagcaaaaggtccaatctggtctaatgagctaccaaaggcaatgagaccgaaacgtgaaactgttccgtaggttggtttgagaccaacgattccgttgaaggcagcaggttggcggatggaaccaccagtatcagaaccaagtgacaagcgaacttgtcctgaggctacagctgcggcagaaccacttgatgacccaccaggaaccttgctgtggttccaagcgtttttagttgctccgtagtgtgaagtttcacctgaaccacccatagcaaattcgtccatgttggtctttccaacgacaatcatgcccttggtttttgcattggcaacagctgtcgcatcaaagattggctcatagttgtagagcatttttgaggcagcagttgtgagaataccgtctgtagagatgttatccttaacagcaagtggaattcctgaaaggacattgtcagcatcaattccagcttcatcaatggctttagcttgaacaagagcttgctcctcagcgatggtgacaaatgaattgagggcttcctcacgagacttgatattttcaagtgttgcttgggtcaattctgttgcagaaatttccttagagacaaggagattgtgcaactcttcaatagttttattgttaaaagtcattaggcatctcctccattgtctaggatagctggcaccttgatatagtagttgtctttttcaggtacgtttttaaacaagcgatcacggtctattccttcttcggccacatcagggcggagtacagtcttgcggtcagccatagtcgtagtaggtgcgacaccagttgtgtcaacttcgcccagcaattcaaccatgtcaacaatcttagacaaggtggtcgcaaaggcagcagtttcttcttcagagaatcttaattttgaaagattggcaacgtgtgttacctcttcttgcgtaattttcatcttgcatcctttcgtgaaatgatgatttttagtctgttctattttaccatattttcctataaataagggagggggaagtgaaaagaaatagaaattgaaaaaaatgctaaaatccgatataatggagtgttgaaaggaatggtaaaatccaatgtaaaaatcattctcagctattgaaacaagaaaaatagagaatcaaagaaagagaacttatgaatattcaagaagaaattaagaaacgtcgtacctttgccattatctcccacccggacgcggggaaaacaaccatcactgagcagttactctactttgggggtgagattcgtgaggctggtacggtaaaagggaagaaaacagggacttttgctaaatctgactggatggatatcgagaagcaacgtgggatttctgttacttcatctgttatgcaatttgactacgacggcaagcgcgtgaatatcttagacacgccagggcacgaggacttctcagaagatacctatcgtaccttgatggcggtggatgctgcggtcatggtcgtggactctgccaaggggatcgaggctcaaaccaagaaattgtttgaggttgtgaaacatcgtggcattccagtctttacctttatgaacaagctggaccgtgacggtcgtgagcctttggatctcttgcaagaattggaagaaatcttgggcattgctagctaccctatgaactggcctatcgggatggggaaagcctttgagggcttgtatgacctctataaccaacgtttagagctttacaaaggggatgagcgttttgccagtctagaagacggggacaaactctttggtagcaatcctttctacgagcaagtcaaggatgacattgagcttttaaatgaagccgggaatgagttttcagaggaagctattctggctggagaattgacgcctgtctttttcggttcagccctgacaaactttggtgtgcagaccttccttgaaaccttcctcaagtttgctccagaaccacatggtcacaagaaaacagacggtgaaattgtggatccttatgacaaggatttctcaggctttgtctttaaaatccaagccaacatggaccctcgtcaccgtgaccgtattgcctttgtccgtatcgtatctggcgaatttgagcgcggcatgagtgtcaatctccctcgtactggtaagggggctaaactatctaatgttacccagtttatggcggagagtcgtgagaatgtgaccaatgccgtggcaggtgatattatcggggtttacgataccggtacttatcaggttggggataccttgacggttggaaaaaacaagtttgaatttgaacccctgccaacctttacacctgagattttcatgaaagtttctgctaagaatgttatgaagcaaaaatccttccacaaggggattgagcaattggtgcaagaaggagccgttcagctttataagaattaccaaacaggtgagtacatgctaggcgctgtaggtcaactccagtttgaagtctttaaacaccgcatggaaggcgagtacaatgcggaagtagttatgaacccaatgggtaaaaagaccgttcgttggatcaagcctgaggacttggatgaacggatgtcgtcaagtcgcaatatcttagccaaagaccgttttgaccaaccagtctttctctttgaaaatgactttgccctccgctggtttgcggacaagtatccagacgtagagttagaggagaagatgtgactcagtaccaacaattggaactaaagttccaaattgttggacgctagtcgctatttggcgaactagctaactgcctcactaactacgtttggcaaatgaaatcgatttgtaaaactccgtgtcgtaatgtaaaaattgtaaaccgtaatgggacttcatctaaaatctccactggtatggttttacgaacgaataggcgaaaataatggttacgtagaaacatatgatgggaaacatatgatgggaataatatgatgggaataaaaagaaatgagataaaaagtgaaagaagagaaaaaagcgattgtcttaggtgcagataatgcttatatggataaagttgaaacaacaataaaatctctttgtgttcatcattataatcttaagttttatgtttttaatgatgaccttccgcgagaatggttccaattgatggaaaaaagactagagactttgaatagtgagattgtgaatgtttagattgacagtaatattctgaaaggttatcgtctcccctttgagggactttcatatgcggcttttttaggtattttattccaaagtatgtaagcgagtctcgtgtactgtatttggattcagatattgttgtaagaaaatcgatagatgagctgtgggatttggacttgacggctatacccttagctgcagttagagatgatttttatacacataattttaattctggtgttctgttaatcaacgatggcatgtggagagcagaaaatgtcacgcaagacctgatttaagacacaaataaaaaatcttccaattcccttgcaaaaaacaagaaaatgtgataacatagtacggtatgtggtgctagcacatccgctatattagatctaataggaggaaaacacaatggctaaagtatgttactttacaggtcgtaagactgtatcaggaaacaaccgttcacacgcgatgaaccaaacaaaacgtgccgtaaaaccaaaccttcaaaaagttactgttcttatcgatggtaaacctaaaaaagtttgggcttcagctcgtgctttgaaatcaggtaaagttgaacgcgtttaataataaaagcaaaggagaccttagggtcttttttcttttattgtgggtataacatcgtttgaaaaatagagtaaatatccgctgatacatcattctgcttttacacttgggctgaaatatgataaaatagagtatcaactagttgaggtaaaaaggatgactgtaaaaattaatacaaaagatggtcaaatcgaactaacagatgaagtgattgcaaccgtcgtaggtggagcagcaactgagatttttggtgtggtcggtatggctagtaaaaatgccctcaaagataatttccaagccctgctaggtaaggaaaattattctaaaggtgtcgtcgtaaaggcagccgaagatggcagtattgcagttgatgtatataccgtgttaagctacggaacaaagattagtgaagtgtcaaaaaacattcaagagcgtgttgcctttagcttggaaaaccagcttggaattactgctcagactgtaaatgtctacattcaaaatatcaaagttgtaggagaataaccgtgtcaaaaattactactagcttatttcaagaaatggtgcaggctgcatcaactcgcttgaataagcaagctgaatatgtcaattcattaaacgtctttccagttccagatggagatactgggacaaatatgggaatgaccattgaaaatggtgctaaagaagttgcagacaagccagcttctacagttggagaagtagcgagcattcttgccaaagggcttttgatgggtgcgcgtgggaactcaggagtgattacgtctcagcttttccgtggattttcccaagctatcaaggataaagacgagttaacaggtcaagacttggctctggccttccaatcaggtgtggaagttgcctataaggcagtgatgaaacctgttgaaggaacgattttaacagtttctcgtggagctgctatcggtgctaagaaaaaagctgagcaaacagatgacgctgttgaagtcatgcgcgcagccttggaaggtgctaaaacagctctagctaaaacaccagacatgcttccagtattgaaagaagttggcgttgtggactcaggtggtcaaggattggtcttcatctacgaaggtttcctttcagcccttactggcgaatatattgcatctgaggactttgtagcgactcctgccaacatgagtgagatgatcaatgtagagcatcataagtctgtagctggtcacgtagcgactgaggacatcacgtttggttactgtactgaaatcatggtagctcttaagcaaggtccaacctatgctaaagattttgactacgatgaattccgtaactacttggatgagcttggagattctctccttgttgttaacgatgatgaaattgtcaaagtccatgttcatacagaagatccaggacttgttatgcaagaaggtctcaaatatggtagcttggtcaaggtaaaagttgacaatatgcgtaaccaacacgaagcacaggttgagaaagaagctactcaagttatcaagtcggctgaagaaaaagagtatgctttgattgctgtggtggctggtaaaggtctagcagatatcttctgttctcaaggcgtggattatgttatcgaaggcggtcaaaccatgaacccttcaacagaagactttatcaaggctgttgaacaggttaatgcccgtaacatcatcttcttgccaaacaacaagaacatcttcatggcagctcaatctgcggcagaagttttggagcaaccagcggtagtggtagaggctcgcactcttcctcaaggtatgacaagtcttcttgcctttgatccaagcaagtccattgaagaaaaccaagagcgtatgacagctgctcttagcgatgtcgttagcggaagcgtcacaacagccgtgcgtgatacaacgatcgatggcttagaaatccatgaaaacgataatttaggtatggtggatggaaaaattcttgtgtcaaaccctgatatgcaccaaacattgactgaaaccttgaaacatatgttggatgaagacagtgaaatcgtaaccttctatgtaggtgaagacggaagcgaagaacttgccaatgaaatcgctcaagaaatcgtagaagaattcgaagacgttgaagtcgagattcaccaaggtcaacaacctgtttacccatacctatttagtgtggaataagattaatgaaggactgagaaatcagttcttttttctttttagtaaatgaaatcggtatctttttaataaaaacaaaaataacattcataaataaacgttaaaatagaaaattcagaaaatttcttcttttatcttgaaaaattttgaaaaaatggtatgatagtaacaagttatttttaagaggaaagaaaggggaataatggagaaaatcagtttagaatctcctaagacggggtcggacctagttttggaaacacttcgtgatttaggagttgataccatctttggttatcctggtggtgcggttttgcctttttatgatgcgatatataattttaaaggcattcgccacattctagggcgccatgagcaaggttgtttgcatgaagctgaaggttatgccaaatcaactggaaagttgggtgttgccgtcgtcactagtggaccaggagcaacaaatgccattacagggattgcggatgccatgagcgatagcgttccccttttggtctttacaggtcaggtggcgcgagcagggattgggaaggatgcctttcaggaggcagacatcgtgggaattaccatgccaatcactaagtacaattaccaagttcgtgagacagctgatattccgcgtatcattacggaagctgtccatatcgcaactacaggccgtccagggccagttgtaattgacctaccaaaagacatatctgctttagaaacagacttcatttattcaccagaagtgaatttaccaagttatcagccgactcttgagccgaatgatatgcaaatcaagaaaatcttgaagcaattgtccaaggctaaaaagccagtcttgttagctggtggtggaattagttatgctgaggctgctacggaactaaatgaatttgcagaacgctatcaaattccagtggtaaccagtcttttgggacaaggaacgattgcaacgagtcacccactctttcttggaatgggaggcatgcacgggtcattcgcagcaaatattgctatgacggaagcggactttatgattagtattggttctcgtttcgatgaccgtttgacggggaatcctaagactttcgctaagaatgctaaggttgcccacattgatattgacccagctgagattggcaagattatcagtgcagacattcctgtagttggagatgctaagaaggccttgcaaatgttgctagcagaaccaacagttcacaacaacactgaaaagtggattgagaaagtcactaaagacaagaatcgtgttcgttcttatgataagaaagagcgtgtggttcaaccgcaagcagttattgaacgaattggtgaattgacgaatggagatgccattgtggtaacagacgttggtcaacaccaaatgtggacagctcagtattatccctaccaaaatgaacgtcagttagtgacttcaggtggtttgggaacaatgggctttggaattccagcagcaatcggtgctaaaattgctaacccagataaggaagtagtcttgtttgttggggatggtggtttccaaatgaccaaccaggagttggctattttgaatatttacaaggtgccaatcaaggtggttatgctgaacaatcattcacttggaatggttcgccagtggcaggaatccttctatgaaggcagaacatcagagtcggtctttgatacccttcctgatttccaattgatggcgcaggcttatggtattaaaaactataagtttgacaatcctgagaccttggctcaagaccttgaagtcatcactgaggatgttcctatgctaattgaggtagatatttctcgtaaggaacaggtgttaccaatggtaccggctggtaagagtaatcatgagatgttgggggtgcagttccatgcgtagaatgttaacagcaaaactacaaaatcgttcaggagtcctcaatcgctttacaggtgtcctatctcgtcgtcaggttaatattgaaagcatctctgttggagcaacagaagatccgaatgtatcgcgtatcactattattattgatgttgcttctcatgatgaagtggagcaaatcatcaaacagctcaatcgtcagattgatgtgattcgcattcgagatattacagacaagcctcatttggagcgcgaggtgattttggttaagatgtcagcgccagctgagaagagagctgagattttagcgattattcaacctttccgtgcaacagtagtagacgtagcgccaagctcgattaccattcagatgacgggaaatgcagaaaagagcgaagccctattgcgagtcattcgcccatacggtattcgcaatattgctcgaacgggtgcaactggatttacccgcgattaaaaatccaacttaaatttattaaaccagcctaaaaggcaataaataatagaaaagagagaaaagctatgacagttcaaatggaatatgaaaaagatgttaaagtagcagcacttgacggtaaaaaaatcgccgttatcggttatggttcacaagggcatgcgcatgctcaaaacttgcgtgattcaggtcgtgacgttattatcggtgtacgtccaggtaaatcttttgataaagcaaaagaagatggatttgatacttacacagtagcagaagctactaagttggctgatgttatcatgatcttggcgccagacgaaattcaacaagaattgtacgaagcagaaatcgctccaaacttggaagctggaaacgcagttggatttgcccatggtttcaacatccactttgaatttatcaaagttcctgcggatgtagatgtcttcatgtgtgctcctaaaggaccaggacacttggtacgtcgtacttacgaagaaggatttggtgttccagctctttatgcagtataccaagatgcaacaggaaatgctaaaaacattgctatggactggtgtaaaggtgttggagcggctcgtgtaggtcttcttgaaacaacttacaaagaagaaactgaagaagatttgtttggtgaacaagctgtactttgtggtggtttgactgcccttatcgaagcaggtttcgaagtcttgacagaagcaggttacgctccagaattggcttactttgaagttcttcacgaaatgaaattgatcgttgacttgatctacgaaggtggattcaagaaaatgcgtcaatctatttcaaacactgctgaatacggtgactatgtatcaggtccacgtgtaatcactgaacaagttaaagaaaatatgaaggctgtcttggcagacatccaaaatggtaaatttgcaaatgactttgtaaatgactataaagctggacgtccaaaattgactgcttaccgtgaacaagcagctaaccttgaaattgaaaaagttggtgcagaattgcgtaaagcaatgccattcgttggtaaaaacgacgatgatgcattcaaaatctataactaattagaaatatatagcgctggagatgattttatgaaaaagattatgagaaaaattgcatcgttattattggttctagttgtataatgtaattacaccgtcggtaatagtgctagcagaccaaaataaagcagattggtcgtatgatgaaaatgctgtaattaacatttatgatgatgctaattttgaagatggtaggttgcatatgaactttgaacaattcttcaaattggcacaaatagctagagaagaaggtcttgaaattcattctccgtttgagagagctggtgcgactaaatctgctcgttatatagcgaaatggattttgagaaataaaaaacattaacaaatatagttggtaaatcattaggacctaaatcagctgttagattcggagaagctttatcctatattgaaggtcctcttcgcagaataaatgagacgatagatggcggtttatatcaaatagagcaaattattgcatctggattgaaagaatcgggtttaaatgactggactgcgaaaactttagcttcagctattcgtgggatattagatgtacttatttaggggttgaaatcatatgaatattaccaatttgttttctatcaagacaggatgtgatgaaactgataggcaactgcaaaaactattttttcagttggatttacaattgggagaattgacagatcaactaagaaaattagattctaattttgttcctcgtagtcaatttgtagacacgttggatttgaatgatgtagaatataaagaaattttaaactattttatcttccatcgtaatgatagtgaagaaagtttggtagaatggttatatgattggatttccacaaatcgttatgaacttcctaaagagttttcgattcgtatggctcataaataccatgaaagtgttactgaagttttcggagatgaataactaaaaaacagtcattagtgactgttttttatagaaaaagaggttttatatgttaagttcaaaagatataatcaaggctcacaaggtcttgaacggtgtggttgtgaatactccactggattacgatcattatttatcggagaagtatggtgctaagatttatttgaaaaaagaaaatgcccagcgtgttcgctcctttaaaattcgtggtgcctattatgccatttcccagctcagcaaggaagaacgtgaacgtggggtagtctgcgcttctgcgggaaatcatgcgcagggagtagcctatacttgtaatgaaatgaaaattcctgctactatctttatgcccattactacgccacaacaaaagattggtcaggttcgcttttttggtggggattttgtaactattaaactagttggagatacctttgatgcctcagccaaagcagctcaagaatttacagtctctgaaaatcgtacctttattgatccttttgatgatgctcatgttcaagcaggtcaaggaacagttgcttatgagattttagaagaagctcgaaaagaatcgattgattttgatgctgtcttggttcctgttggtggtggcggtctcattgccggggtttctacctatatcaaggaaacaagtccagagattgaggttatcggagtagaggcgaatggagcgcgttccatgaaagctgcctttgaggctggaggtccagtaaaactcaaggaaattgataaatttgctgatgggattgctgtgcaaaaggtaggtcagttgacctatgaagcaactcgtcaacatattaaaactttggtaggtgtcgatgagggattgatttctgaaaccttgattgacctttactctaagcaagggatagtcgcagaacctgctggagcggctagtatcgcctctttagaggttttagctgaatatattaaggggaaaaccatttgttgtatcatttctggaggaaataatgatatcaaccgtatgccagaaatggaagagcgtgccttgatttatgatggtatcaaacattactttgtggtcaatttcccacaacgtccaggagctttgcgtgagtttgtaaatgatatcctggggccaaatgatgatatcacacgttttgagtatatcaaacgagctagcaagggaacaggcccagtattaattgggatcgctttagcagataagcatgattatgcaggtttgattcgtagaatggaaggttttgatccagcttatattaacttaaatggtaatgaaacgctttataatatgcttgtctgaggactaataaaaaaatatcataccttcattttgatttcctatctattgacaagcatagtcacactgtctttaatactcttcgaaaatctcttcaaaccacgttagctctatctgcaacctcaaaacagtgttttgagcaacttgcggctagcttcctagtttgctctttgattttcattgagtataaggtatgatttgatttctttttgttgacaaatatactatattaaaaagatatataagtaattaactgagcttatctgtcttgtcatctctattaaggatggtttagataatcgggtgtctgcttctaggctagcacctcaatatccaaaggagtgatgaatttgaaggacataaggaatacctatctctcagatgatttattgaggaagaaagataggagtttttgagctagtgaaggcttggatttctaaaggttagaactatcatcttcagttcttaaatcgaagaaataagctatcttacggaaatagagaagcattttttaagaacttgaataatttcgcaccttaagagggtaataatacagtatttttattagcaaatatttatggtgtagaggctagcaaaacctatatattatcggatttaaaaaggaagtaagaaaattctgaactaattattttcgttgaatatatgttttttttattgacaaaagtagtaaaaacgtatacaattaaatattataaagaagaaaataggagaaaaacatggctaagtcaaactttgaaaaagtagaatcagttgttggctgggttcgtgataagaaaatcacaggctaccgtatctctaaagaaacgaatgcgcgtgaaatgtctatcattgctctggcgcagggtcgtgcaaaagtaaaaaatatttcatttgaaacagccctaggcctaattgatttctatgaaaaaaattatgaaaaatttgaagattaatctttggataacggcggattcttgaccttcaagtagtagagatagagaatctgccttttcattttgaggacagcaaaaagactgcacggttgatgcagccttttctttttatttgagatagcgttgaaggaactcttttgttcggtcttctttaggattggtgaagaggtcttctggtttaccttcttcagcgatcacgcccttatccataaagataacacggtgagagacatcacgggcaaattccatttcatgggttacgacaatcatggtcaagccttcctgagccaggtcctgcatgattttgaggacttctccaaccatttctggatcgagagctgatgttggttcatcaaagagaatagcgtccggattcatggagagggcacgagcgatggccacacgttgtttttgaccacctgagagttgttttggtttggcttgccagtagcgttctcccatgccgaccttttccaggttttctttggcaatcttttcagcttctgtgcgttcgcgttttaggacagttgtctgagcgacgattgtgttttcaagaacattgagattttcaaagaggttaaaggattggaaaaccatccccaacttttcacggtattgcgtgaggtcatagcctttttcgaggacgttttgtccatgataaaggatttgtccatcagttggtgtttcaagtaggttaatggagcgtaggaaggtcgattttccgcttccagagcttccgatgatagagatgacctctcccttgtggacagtgagtgaaatgtcttttagcacttcgttttgtccataggattttttgaggtgtttaatttcaaggattgcttgtgtcattatttcaaatcctccgtttgcatttggttagcacctgtagtgtaggtatccatgtccattctgcgctcgataaagcgtaggatacgtgttacggtgaaggtgaggacaaagtaaatcacggcgatgattgtaaatgtctggaagtattgataggtttgtgttgccacggtatttcctgagaaataaagttcgacaacagagataacgttcaatacagatgtatctttgatattgatgacaaattcattaccagttgcaggtaggatgttacggactacctgaggtaggacaatcttacgcatggtctggttatgggtcataccaagagcagtcgcagcttcaaattgtcccttgtcaactgctaggataccaccacggacgatttcagtcatgtaggcaccggtattgattgaaacgatgaagatagcagccagtgtacggtcaaggttgatcccgaaagcttgggcagttccatagtagataaccatcgattgaacaatcattggcgtaccacggaaaatttcaatgtagacattgagaacccagccgactagtttttgtaggccgtaaatgactttgttttcagagagaggagcagtacggaagacaccaatggcaagtccaataatgagacctatgatggttccgacgatagagattaaaagagtgataccagcaccacgcaagagttgttgccagttttcagaaagaattttagcaacttggctaaagaaactactgctagtctcttcagttgttgtagcttcggcaggttgttccttgatcatacgatccatcaaggcaacttggtcatcttttgaaatggtttcaatgctggcattgatttggctaatacgattgtcatttttacgaagcccgatagcgatagctgtatcttcttccccagttttgaaaccaggttctacttgaatcatcttgaacttagagttcgcagcttcagcagtcagtgcttctggacgttcagaaacataagcatcaatgacaccagcctcaagagcttgtcgcatttgagcgaagtctcccatggctgtttcttttttagcacctgggatttgtgcaatcaagttataaaggtagaccccttgttgagaagtgatttttgcaccgttaaagtcatccaaagatttagcacttgcgtaggcagaatcttttttgacaagcaaaactggttcgctagtatagtaactgctcgaaaaggcaatttcttgtttgcgttctgcagttggactcatacctgcgataatcatgtcaatcttaccagaagtaagggcagggactagaccttcccacttggttttaacaaccaaaggttctttacctaagtccttagcgattttcttggcgatttgaacatcgtatccgttggcatactgattggtcccatcgattttgacagctccgttgctatcatcatcctgggtccagttaaagggagcatatgctgcttccataccgatgcgtaaatattcatcggcttgagcaacattgacaagtcctagcatcagcaagagacttgtgaaaatagataagtatatttttctcatgatttctcctattctgatctattaaaaaataactgtctcctattttatcgaaaaatgcgtaatttttcaacataagtaagtctttacttacgaaaaaatgctataatgataagaaagataaaaagggggcttagttgatgaaaaaaacttttttcttactggtgttaggcttgttttgccttcttccactctctgtttttgccattgatttcaagataaactcttatcaaggggatttgtatattcatgcagacaatacggcagagtttagacagaagatagtttaccagtttgaggaggactttaagggccaaatcgtgggacttggacgtgctggtaagatgcctagcgggtttgacattgaccctcatccaaagattcaggccgcgaaaaacggtgcagaactagcagatgtgactagcgaagtaacagaagaagcggatggttatactgtgagagtctataatccaggtcaggagggcgacatagttgaagttgacctcgtctggaacttaaaaaatttacttttcctttatgatgatatcgctgaattaaattggcaacctctgacagatagttcagagtctattgaaaagtttgaatttcatgtaaggggagacaagggggctgaaaaactctttttccatacagggaaactttttagagagggaacgattgaaaagagtaaccttgattatactatccgtttagacaatcttccggctaagcgtggagttgagttgcatgcctattggcctcggaccgattttgctagcgctagggatcagggattgaaagggaatcgtttagaagagtttaataagatagaagactcgattgttagagaaaaagatcagagtaaacaactcgttacttgggtcctcccttcgatcctttccatctccttgttattgagtgtctgcttctattttatttatagaagaaagaccactccttcagtcaaatatgccaaaaatcatcgtctctatgaaccaccaatggaattagagcctatggttttatcagaagcagtctactcgacctccttggaggaagtgagtcccttggtcaagggagctggaaaattcacctttgatcaacttattcaagctaccttgctagatgtgatagaccgtgggaatgtctctatcatttcagaaggagatgcagttggtttgaggctagtaaaagaagatggtttgtcaagctttgagaaagactgcctaaatctagctttttcaggtaaaaaagaagaaactctttccaatttgtttgcggattacaaggtatctgatagtctttatcgtagagccaaagtttctgatgaaaaacggattcaagcaagagggcttcaactcaaatcttcttttgaagaggtattgaaccagatgcaagaaggagtgagaaaacgagtttccttctgggggctcccagattattatcgtcctttaactggtggggaaaaggccttgcaagtgggtatgggtgccttgactatcctgcccctatttatcggatttggtttgttcttgtacagtttagacgttcatggctatctttacctccctttgccaatacttggttttctagggttagttttgtctgttttctattattggaagcttcgactagataatcgtgatggtgttctaaatgaagcgggagctgaggtctactatctctggaccagttttgaaaatatgttgcgtgagattgcacgattggatcaggctgaactggaaagtattgtggtctggaatcgcctcttggtctatgcgaccttatttggctatgcggacaaggttagtcatttgatgaaggttcatcagattcaagtggaaaatccagatatcaatctctatgtagcttatggctggcacagtacgttttatcattcaacagcacaaatgagccattatgctagtgtcgcaaatacagcaagcacctactctgtatcttctggaagtggaagttctggtggtggcttctctggaggcggaggtggcggcagtatcggtgccttttaaagagagctaccatagactgaaaaagtatgatataatggaagatagaaaaaagacaaactataagaaaagtcaatagttttatctaaactatttcttatttcaatttgatgatttggcgatgattttagagcacggcaaaaagcccttgaaaaagtccattttttcaaaggtaatcctgtgttaatttcagaaattacatcactttttgttcgtcaaatggcagctcttttttaggatataaaacagggttcggataagtttttttgcaaggtggatgatggctacattgtaatgttttccttattctaacttagtcttaagataggccttagaagcaggtgaaaagcgagggcatgctttggcagcttgtatgagtgcccaccgcagatgaggggaaccccgtttgaccattcttccagctaaatcaatctgacctgactgataaatagaagaatccagtccagcgaaagcttgtaattgagcaggattatcaaaggcatgaatatttcgaatctcggctaaaatgaccgccctaaacgatccccaatcccagtaaccgtcgtgatgaccgagttgaactcagccatcgagtcattgatacatgtttccgccttgtcaatgagcctcttgtaatgcttgatgatttcgaattcacgagcaggagatgttgttccgatagaacgaggtgcgactgagaggatatcctgaattttagaagcggtcaatcgcttaatttctatcagcttatcaaatcctgcctcaatccttttctgaggattagggtagcgtgtcaagagttggtaggtatattctgaatgctttccaacgattttatccaactcaggaaagatgatatcaagacaacgagtgtattgtactttccaatcagactgtttttcttgagacgatgaatatgtctagccagtatttttaggtctacttgccgattatcgtgttgaaattgttcacgattggggtcagaaagaagtttaagagcgatgccatgagcgtctttcttatccgttttagtcttgcgaagtgataatgatttggcaaattccttgatgagcaaaggattgtaggtgtaaactttatatccttgttcatgcaggaagttcagtagattaaaggcataatgtccagtatcttcaagagcgatgagacagtcttggttgatctgtcgaatagacagatctaagagttcaaaaccagctttattatttgaaaaagtgagtggtttaagaacagtttttcctggaacattcaaggctgtaacatcgtgtttatttttagcgatatcaatgcctacataaagcatgggagtacctccagatatagtatttcaagtctacttggttatccacgaattttttgccttgttaccttagacgagatcaaacgtctatgcgttatcaaactcattaccaattgaaacaaaagctgtggttagagcctttcggaaatcgtcaagcgattggaggaaatgaactaatccatagtggcttattccaagtataccacttgggctttggcagtagctaactgcgctaaatataatatagggagtaatctatgtatcttattgaaattttaaaatctatcttcttcggaattgttgaaggaattacggaatggttgccgatttccagtacaggtcacttgattttagcagaggaattcatccaataccaaaatcaaaatgaagcctttatgtccatgtttaatgtcgtgattcagcttggtgctattttagcagttatggtgatttattttaacaagctcaatccttttaaaccgaccaaggacaaacaggaagttcgtaagacttggagactatggttgaaggtcttgattgctactttacctttacttggtgtctttaaatttgatgattggtttgatacccacttccataacatggtttcagttgctctcatgttgattatctacggggttgccttcatctatttggaaaagcgcaataaagcgcgtgctatcgagccaagtgtaacagagttggacaagcttccttatacgaccgctttctatatcggactcttccaagttcttgctcttttaccagggactagccgttcaggtgcaacgattgtcggtggtttgttaaatggaaccagtcgttcagttgtgacagaatttaccttctatcttgggattcctgttatgtttggagctagtgccttaaagattttcaaatttgtgaaagccggagaactcttgagctttgggcaattgtttttgctcttggtcgcgatgggagtagcttttgcggtcagcatggtggctattcgcttcttgaccagctatgtgaaaaaacacgacttcaccctttttggtaaataccgtatcgtgcttggtagtgttttgctactttacagttttgtccgtttatttgtataagaaaaaccttgaaggggcaactcttcaaggttttatactcttcgaaaatctcttcaaaccgcgtcagctttatctgcaacctcaaaacagtgttttgagcagcctgcggctagcctcctagtttgctctttgattttcattgagctttaaaatccagtcatggtaatccccaataggcggacacctctttctttcttgcttaattcttcatagagttgcagggctatttggcttatctgactagcatcttgtgttttttgagcaagactttttcgtttggtaagagttgaaaagtcctcgtagcggattttcaaaatgacaatttttccagctttttcttgttgatgtagattgagagcgactttttctgatagaagagtcagctcttttttgatatcttcctcagcaaggagaatcttcccgtaggttttctccttgccgattgatttacggatgcgattggatttgactggagagttgtgaatgccacgagcctttcgatacagatcatagcctagtctaccaaaacggtctattagggttacctcaggaacttcaagtaaatcagcaccagtaaaaacgcccatttgatgaagacgttctactgtcttttttcctactccatgaaatttggaaatatccatttgtttgagaaaatcctcagcctgttcaggtagaatcactgtcaaaccatgtggtttttgataatcactcgccattttagctaagaatttgttgtaagaaacgcctgcggaagcagttagatggagttcttgccagatatctttttgaatgaggcgagcaattttgaccgctgacttgataccgagtttattttctgtcacatccaaataggcttcgtcaatgctcatgggttcaatcaaatctgtatagcgcttaaaaatagctcgaatctggagtcccacagacttgtatttctcataattccctgagataaagacagcctggggacaacgttcataagcttccttggaactcatggcagaatggacaccaaaagctcttgcctcataactacaggtagaaacgactccccgtccacctgtttgccgagggtcgcttccaataatgacaggttttcctctgagtttaggattatccctgatttccactgcagcaaaaaaggcatccatgtcaatatggatgatttttcttgacaaatcatttaacaaaggaaaaatcaacatgcctagcacctttttatactcttcgaaaatctcttcaaaccacgtcagctctatctgcaacctcaaaacagtgttttgagcaatctgcggctagcttcctagtttgcttttcgatttccattgagtgttactgcttattttcttttattatacccttttttctgaaaaaaagaaaaaaggactttattttttcaaaaatataatacagtttgaaataaaatatagactgttttagaaaagaaagtgtaaaaatagggaattttcacttgttgaaatcggttactatatggtatacttgtcttatgaatgtaacagatgactgttactagaaaaaagaggacattaatatggttgttaagacagttgttgaagcacaagatatttttgacaaagcttgggaaggcttcaaaggcgtagattggaaagaaaaagcaagtgtatcacgatttgtacaagctaactacacaccttatgatggagacgaaagcttccttgcaggaccaacagagcgttcacttcacatcaagaaaattgtagaagaaactaaagcacactacgaagaaactcgtttcccaatggacactcgtccaacatctatcgctgatatccctgctggatttatcgacaaagaaaatgaagttatcttcggtatccaaaacgatgaactcttcaaattgaacttcatgccaaaaggtggtatccgtatggctgaaactactttgaaagaaaatggatacgaaccagacccagctgttcacgaaatcttcactaaatatgtaacaacagttaacgacggtattttccgtgcctacacttcaaatattcgtcgcgctcgtcacgcacacactgtaactggtcttccagatgcatactcacgcggacgtatcatcggtgtttacgcacgtcttgctctttacggtgcagactacttgatgcaagaaaaagtaaatgactggaatgcaatcaaagaaatcgatgaagaaacaatccgtcttcgtgaagaagtaaaccttcaataccaagcattgcaacaagttgttcgcctgggtgacctttacggggttgatgttcgcaaaccagcgatgaacgtgaaagaagcaatccaatgggttaacattgctttcatggctgtctgccgtgtgattaacggtgctgctacatctctaggtcgtgtaccaatcgtattggacatctttgcagaacgtgaccttgctcgtggtacatttactgaatcagaaatccaagaattcgttgatgatttcgttatgaaacttcgtacagttaaatttgctcgtacaaaagcttatgaccaattgtactcaggtgacccaacctttatcacaacttctatggctggtatgggtaacgacggtcgtcaccgtgttactaagatggactaccgtttcttgaacactcttgacaacatcggtaactcaccagaaccaaacttgacagttctttggactgacaaattgccatacaacttccgtcgctactgtatgcacatgagccacaaacactcttctatccaatacgaaggtgtaacaacaatggctaaagacggatatggtgaaatgagctgtatctcatgctgtgtgtctccacttgatccagaaaatgaagaacaacgccacaacatccagtacttcggtgctcgtgtaaacgttcttaaagcccttcttactggtttgaatggtggttacgacgatgttcacaaagactacaaagtatttgatatcgaaccaatccgtgacgaagttcttgaatttgaatcagttaaagcgaactttgaaaaatctcttgactggttgactgacacttacgtagatgccttgaacatcatccactacatgactgataggtacaactacgaagctgttcaaatggccttcttgccaactaaacaacgtgccaacatgggattcggtatctgtggatttgctaacactgttgatacattgtcagctatcaaatacgctacagttaaaccaatccgtgacgaagatggctacatctacgattacgaaacaatcggtgactacccacgctggggtgaagatgacccacgttcaaacgaattggcagaatggttgatcgaagcttacacaactcgtctacgtagccacaaactatacaaagacgcagaagctacagtatcacttttgacaatcacatctaacgttgcttactctaaacaaactggtaactcaccagttcacaaaggtgtatacctcaacgaagatggttctgtgaacttgtctaaacttgaattcttctcaccaggtgctaacccatctaacaaagctaaaggtggttggttgcaaaacttgaactcactttctagccttgactttagttatgcagctgacggtatctcattgactacacaagtatcacctcgcgctcttggtaagactcgtgatgaacaagttgataacttggtaacaattcttgatggttacttcgaaaacggtggacaacacgttaacttgaacgttatggacttgaacgatgtttacgaaaaaatcatgtcaggcgaagacgttatcgtacgtatctctggatactgtgtaaacactaaatacctcactccagaacaaaaaactgaattgacacaacgtgtcttccacgaagttctttcaatggatgacgccttggatgcattgagctaatcaagttcttgaataataaaaaggaaccctcggtcaaacgactgagggttttgtgcttgggatagtatgagcaattccttcggcgcaatatgcaatgtttttgggctctttgtcaactgtagtgggttgaaaaaaagctaagcttgagaaaggacaaatttcgtcctttcttttttgatgttcagggcgataaaaatccgttttttgaagttttcaaagttccgaaaaccaaaggcattgcgcttgatgtctttgatgagtttgttagtggcctcaagtttagcgttagaataaggcaattcaatggcgttagtgatgtagtttttatagcaaataaatgtgctcaaagtggttttaaaggtgcggttgagatgaggtaacgtgtcttgaattaagccccaaaactggtcagtattcttctcttgtagatgaaataggagtagttgatacaggtcatagtaatctttaagttcaggtactagagtaaagattttcttcagacactccctaggagttaaggtctctctgaaagttctagcatagaaaggcttaagagagagtttccgactatcttttaggataaatttccagtaatatttaagagctctgtattccagagatttatcatcaaattgcttcatgatgttgattctagtctgattaagagccctgctcatgtgttggacaatgtggaaacgatcgagaacaattttagcattgggaaataatttcttaatgagagggatataacttccagacatatcaacagtgacgactttaactttttttctagcttctttcgagtacttgaagaaatgatttcggatggttgtttgacgtctgttatcaagaatggtcatgattttcttagtgttgaaatcctgagcaatgaaagccaatttccccttctggtaggagaattcatcccaggagaggatttcaggcaaagtggtgtaatcctcttggaaatgaaattgcttgagcttacgatagacggtagaggtagaggtagaggtagagatggctaatttagaagcgatatgtgtaagagcctctctgttgagtaggagttgggcaattttctgtctcaccatttccgagatttggcaatttttctgaacgagagttgtttcagctacagtgactttccgacaggacttgcattgaaatcgtctctttttcaaatgaatgaggctagggaaaccaccaatctcgataaaagggattttagaaggcttttggaagtcgtatttgatttgttttcctttacagtgtttacatttaggtgggtgataatcaagtgtagcgaagacttcgatatgggtatcgtgctgaatggctttatttaaggtgatgtttttgtcttttattccgatgagtaatgtggtatgattgatgtgttccataagatactttctaatgagttgtttaggcgcttttcattataagtcttatgggacttttttgatactcaaaaagccctataatctccacagtgggatttacccactacagaaattatagagccagaaaaaacacttttgttcactagcagaaactagagagcagaagtgtttttctgttcagatttacccaaaactgggaaatatggggataagaatagagatggcttaggaagcccctttttgtgtgtagacagtacgatgaacttataacaaatagtgagcctttttagcaatcattgcgacccgtttgtcaaaagcctcttttcggatatctacaattgtctgatagatgagacgctgttggctaacatgcaaatctaaggcaatcgtcaaaaagtgatgtttccctttgggatactgctttttaacgtaaggcaggtattctttcgttgtaataataatcaatggctctgtcaaatgctcctctgaaggaggaggactaattagaatattgtatcctgtaacagaggcaactttgtcagtaaaattccgtaaaataatggactttattaagtttacatctgcttgattatttaaaatgataaaaatcgggatagcaggtagtgaggaaaagatggtttctgtcaagtagagtgagaaaaggtacagccgatgctggtcgataactccttcaatcttctgctcagtcatccactcttgaacaattgctttcgaaatatgatacagtggcttgtcgctttcaatcccataatgttcgtaataattataatagggaactagattttgtaaaccaaacaaaaacgttcttgttaagaaagtcagtgctgttaaaaaagaaagagaattcgaaatgtcatttcctaagatattcttgaacttggatagtagatgctttcctcttgtatgctgaagaatcagttgaatagtatgagtctttttttcttgattccatttgtccttggaaaacgaagaattagcagaacaataaaccaaaaagatataatccagttcttcctgagtaaaagtcatgttggcatgtggctctaagtaagtttggcaatgttccatcaaaatcggatacataaagaggttttttaatttttcaaactctttggactcagggaactcaagtggaaattcccgacgtttccaagtgagtgccactagtatgctaaaatgaacatactcgtcaggtgtgatttctaacagttcatgactgagttgagaattagactgcacaatcatatgtgtgacccaatccatacttccatcattcaaatcataaatctcaataccaaaatgaaactggaggagtgcaattaaaaaacgaatgcgatattcaggaccaactacttgatttttcacaaggtccaaacctactgaacgtagtaacaagccacacttttgtcgtacgcggtagcctgttgcgatggaaatatactctttttgtgtaaattcgttaaagctttgattaccttgtagtagaaagaagcggagtatttttaaaatagttgattggttataaagctgatggaagtaataattcgtttgatgagaatggtgttcgattaattgaacttgttgcgtatctaaattaaatgtcaactcttcctcgaatgtttcttgtaattcctgcaaaatgcttaggagacttttagattgtaatgaagttaaagtagacagttcatctagttcaatagaccgaatatccaataatatatttaaaatggtaattttatctgtaattcttttttcaatgtatttgtttagcatagttaccgaatcttagttgcatatagataattttaattattataatacaaaagaaactaattgtcttgtcaaaaaggttgtggaatttccgactttattgataaaacagcatgtaataaaaggcattttaaagatagtaatgagtattggtggagttttatggcttattttttttattagaaaatatttttttatcaaatattgtcgttctataaaaaaatatgtgataaaaatatctattgtgatggaagttgttttaatttatactaggatagttaatagtaatactatactatactatattgtatacaagtgtgtcattgccaggttgagaagatagctataacgcacttttatacgcttttgctacgtttgttagtgaacggattaactcagtgagataaattttatcagaacataagtaatccgtttcttcgtgtatacagattgaaagtacctatgaatcatagaaggattaacttgttctatgaataatgcttaacagggagacacacatgaaaaaagtaagaaagatatttcagaaggcagttgcaggactgtgctgtatatctcagttgacagctttttcttcgatagttgctttagcagaaacgcctgaaaccagtccagcgataggaaaagtagtgattaaggagacaggcgaaggaggagcgcttctaggagatgccgtctttgagttgaaaaacaatacggatggcacaactgtttcgcaaaggacagaggcgcaaacaggagaagcgatattttcaaacataaaacctgggacatacaccttgacagaagcccaacctccagttggttataaaccctctactaaacaatggactgttgaagttgagaagaatggtcggacgactgtccaaggtgaacaggtagaaaatcgagaagaggctctatctgaccagtatccacaaacagggacttatccagatgttcaaacaccttatcagattattaaggtagatggttcggaaaaaaacggacagcacaaggcgttgaatccgaatccatatgaacgtgtgattccagaaggtacactttcaaagagaatttatcaagtgaataatttggatgataaccaatatggaatcgaattgacggttagtgggaaaacagtgtatgaacaaaaagataagtctgtgccgctggatgtcgttatcttgctcgataactcaaatagtatgagtaacattcgaaacaagaatgctcgacgtgcggaaagagctggtgaggcgacacgttctcttattgataaaattacatctgattcagaaaatagggtagcgcttgtgacttatgcttccactatctttgatgggaccgagtttacagtagaaaaaggggtagcagataaaaacggaaagcgattgaatgattctcttttttggaattatgatcagacgagttttacaaccaataccaaagattatagttatttaaagctgactaatgataagaatgacattgtagaattaaaaaataaggtacctaccgaggcagaagaccatgatggaaatagattgatgtaccaattcggtgccacttttactcagaaagctttgatgaaggcagatgagattttgacacaacaagcgagacaaaatagtcaaaaagtcattttccatattacggatggtgtcccaactatgtcgtatccgattaattttaatcatgctacgtttgctccatcatatcaaaatcaactaaatgcattttttagtaaatctcctaataaagatggaatactattaagtgattttattacgcaagcaactagtggagaacatacaattgtacgcggagatgggcaaagttaccagatgtttacagataagacagtttatgaaaaaggtgctcctgcagctttcccagttaaacctgaaaaatattctgaaatgaaggcggctggttatgcagttataggcgatccaattaatggtggatatatttggcttaattggagagagagtattctggcttatccgtttaattctaatactgctaaaattaccaatcatggtgaccctacaagatggtactataacgggaatattgctcctgatgggtatgatgtctttacggtaggtattggtattaacggagatcctggtacggatgaagcaacggctactagttttatgcaaagtatttctagtaaacctgaaaactataccaatgttactgacacgacaaaaatattggaacagttgaatcgttatttccacaccatcgtaactgaaaagaaatcaattgagaatggtacgattacagatccgatgggtgagttaattgatttgcaattgggcacagatggaagatttgatccagcagattacactttaactgcaaacgatggtagtcgcttggagaatggacaagctgtaggtggtccacaaaatgatggtggtttgttaaaaaatgcaaaagtgctctatgatacgactgagaaaaggattcgtgtaacaggtctgtaccttggaacggatgaaaaagttacgttgacctacaatgttcgtttgaatgatgagtttgtaagcaataaattttatgataccaatggtcgaacaaccttacatcctaaggaagtagaacagaacacagtgcgcgacttcccgattcctaagattcgtgatgtgcggaagtatccagaaatcacaatttcaaaagagaaaaaacttggtgacattgagtttattaaggtcaataaaaatgataaaaaaccactgagaggtgcggtctttagtcttcaaaaacaacatccggattatccagatatttatggagctattgatcaaaatggcacttatcaaaatgtgagaacaggtgaagatggtaagttgacctttaaaaatctgtcagatgggaaatatcgattatttgaaaattctgaaccagctggttataaacccgttcaaaataagcctatcgttgccttccaaatagtaaatggagaagtcagagatgtgacttcaatcgttccacaagatataccagcgggttacgagtttacgaatgataagcactatattaccaatgaacctattcctccaaagagagaatatcctcgaactggtggtatcggaatgttgccattctatctgataggttgcatgatgatgggaggagttctattatacacacggaaacatccgtaaagtgtagaaatgataatatctatgttctgaacgatacttttaagaagtagcactcaagaagagatttaagtttacttggtgaaacctgttttattcgtaagtaaactatcattgaaaggggagatgttttcgaaaacttgcacagaaaaaggattattattgtcatgtgtaattcattacattgctcacagttgattttaagagatatgaataaggagaaatcatgaaatcaatcaacaaatttttaacaatgcttgctgccttattactgacagcgagtagcctgttttcagctgcaacagtttttgcggctgggacgacaacaacatctgttaccgttcataaactattggcaacagatggggatatggataaaattgcaaatgagttagaaacaggtaactatgctggtaataaagtgggtgttctacctgcaaatgcaaaagaaattgccggtgttatgttcgtttggacaaatactaataatgaaattattgatgaaaatggccaaactctaggagtgaatattgatccacaaacatttaaactctcaggggcaatgccggcaactgcaatgaaaaaattaacagaagctgaaggagctaaatttaacacggcaaatttaccagctgctaagtataaaatttatgaaattcacagtttatcaacttatgtcggtgaagatggagcaaccttaacaggttctaaagcagttccaattgaaattgaattaccattgaacgatgttgtggatgcgcatgtgtatccaaaaaatacagaagcaaagccaaaaattgataaagatttcaaaggtaaagcaaatccagatacaccacgtgtagataaagatacacctgtgaaccaccaagttggagatgttgtagagtacgaaattgttacaaaaattccagcacttgctaattatgcaacagcaaactggagcgatagaatgactgaaggtttggcattcaacaaaggtacagtgaaagtaactgttgatgatgttgcacttgaagcaggtgattatgctctaacagaagtagcaactggttttgatttgaaattaacagatgctggtttagctaaagtgaatgaccaaaacgctgaaaaaactgtgaaaatcacttattcggcaacattgaatgacaaagcaattgtagaagtaccagaatctaatgatgtaacatttaactatggtaataatccagatcacgggaatactccaaagccgaataagccaaatgaaaacggcgatttgacattgaccaagacatgggttgatgctacaggtgcaccaattccggctggagctgaagcaacgttcgatttggttaatgctcagactggtaaagttgtacaaactgtaactttgacaacagacaaaaatacagttactgttaacggattggataaaaatacagaatataaattcgttgaacgtagtataaaagggtattcagcagattatcaagaaatcactacagctggagaaattgctgtcaagaactggaaagacgaaaatccaaaaccacttgatccaacagagccaaaagttgttacatatggtaaaaagtttgtcaaagttaatgataaagataatcgtttagctggggcagaatttgtaattgcaaatgctgataatgctggtcaatatttagcacgtaaagcagataaagtgagtcaagaagagaagcagttggttgttacaacaaaggatgctttagatagagcagttgctgcttataacgctcttactgcacaacaacaaactcagcaagaaaaagagaaagttgacaaagctcaagctgcttataatgctgctgtgattgctgccaacaatgcatttgaatgggtggcagataaggacaatgaaaatgttgtgaaattagtttctgatgcacaaggtcgctttgaaattacaggccttcttgcaggtacatattacttagaagaaacaaaacagcctgctggttatgcattactaactagccgtcagaaatttgaagtcactgcaacttcttattcagcgactggacaaggcattgagtatactgctggttcaggtaaagatgacgctacaaaagtagtcaacaaaaaaatcactatcccacaaacgggtggtattggtacaattatctttgctgtagcgggggctgcgattatgggtattgcagtgtacgcatatgttaaaaacaacaaagatgaggatcaacttgcttaagtaagagagaaaggagccattgatgacaatgcagaaaatgcagaaaatgattagtcgtatcttctttgttatggctctgtgtttttctcttgtatggggtgcacatgcagtccaagcgcaagaagatcacacgttggtcttgcaattggagaactatcaggaggtggttagtcaattgccatctcgtgatggtcatcggttgcaagtatggaagttggatgattcgtattcctatgatgatcgggtgcaaattgtaagagacttgcattcgtgggatgagaataaactttcttctttcaaaaagacttcgtttgagatgaccttccttgagaatcagattgaagtatctcatattccaaatggtctttactatgttcgctctattatccagacggatgcggtttcttatccagctgaatttctttttgaaatgacagatcaaacggtagagcctttggtcattgtagcgaaaaaaacagatacaatgacaacaaaggtgaagctgataaaggtggatcaagaccacaatcgcttggagggtgtcggctttaaattggtatcagtagcaagagatgtttctgaaaaagaggttcccttgattggagaataccgttacagttcttctggtcaagtagggagaactctctatactgataaaaatggagagatttttgtgacaaatcttcctcttgggaactatcgtttcaaggaggtggagccactggcaggctatgctgttacgacgctggatacggatgtccagctggtagatcatcagctggtgacgattacggttgtcaatcagaaattaccacgtggcaatgttgactttatgaaggtggatggtcggaccaatacctctcttcaaggggcaatgttcaaagtcatgaaagaagaaagcggacactatactcctgttcttcaaaatggtaaggaagtagttgtaacatcagggaaagatggtcgtttccgagtggaaggtctagagtatgggacatactatttatgggagctccaagctccaactggttatgttcaattaacatcgcctgtttcctttacaatcgggaaagatactcgtaaggaactggtaacagtggttaaaaataacaagcgaccacggattgatgtgccagatacaggggaagaaaccttgtatatcttgatgcttgttgccattttgttgtttggtagtggttattatcttacgaaaaaaccaaataactgatattcaatgtacatcattatgaaaaagatagcaggctgaagggaagaccagagtactctgaggtgatgttaatcaggaatcatggtgatgtggcatgaatcacaataacggatatgaggctgggcagattgtgccagcctcattgtgggttattgtttgtaaaacgataggactggtctggtaatcattttaggaatggacaggactgggattctgatttaaaatggatggtgaatcagaaagaaatgagattttctcgtttctcttagcagataggattgtctgttaggaaaagcgataaaatgatgagtttgaagataaagggatgctgataaaaatggtaaaaacaaaaaagcaaaaacgaaataatctcctattaggagtggtatttttcattggaatggcggtaatggcgtatccgctggtgtctcgcttgtattatcgagtggaatcaaatcaacaaattgctgactttgataaggaaaaagcaacgttggatgaggctgacattgatgaacgaatgaaattggcacaagccttcaatgactctttgaataatgtagtgagtggcgatccttggtcggaagaaatgaagaaaaaagggcgagcagagtatgcacgtatgttagaaatccatgagcggatggggcatgtggaaatccccgttattgacgtggatttgccggtttatgctggtactgctgaagaggtattgcagcaaggggctgggcatctagagggaacttctctgccgatcggaggcaattcgacccatgcggtgattacggcacatacaggtttgccaacagctaagatgtttacggatttgaccaaacttaaagttggggataagttttatgtgcacaatatcaaggaagtgatggcctatcaagtggatcaagtaaaggtgattgagccgacgaactttgatgatttattgattgtaccaggtcatgattatgtgaccttgctgacttgtacgccatacatgatcaatacccatcgtctattggttcgggggcatcggataccgtacgtagcagaggttgaggaagaatttattgcagcaaacaaactcagtcatctctatcgctacctgttttatgtggcagttggtttgattgtgattcttttatggattattcgacgcttgcgcaagaagaaaaaacaaccggaaaaggctttgaaggcgctgaaagcagcaaggaaggaagtgaaggtggaggatggacaacagtagacgttcacgaaaaaaaggcacaaaaaagaagaaacatccgctgatccttcttctgattttcttagtaggattcgccgttgcgatatatccattggtgtctcgttattattatcgtattgagtcaaacgaggttattaaagagtttgatgagacggtttcccagatggataaggcagaacttgaggagcgttggcgcttggctcaagccttcaatgcgaccttgaaaccatctgaaattcttgatccttttacagagcaagagaaaaagaaaggcgtctcagaatatgccaatatgctaaaggtccatgagcggattggctatgtggaaattcctgcgattgatcaggaaattccgatgtatgtcggaacgagtgaggacattcttcagaaaggggcagggctgttagaaggggcttcgctgcctgttggaggtgaaaatacccatacagtgatcactgctcacagaggattgccaacggcagaattgttcagtcaattggataagatgaaaaaaggggatatcttttatcttcacgttttagatcaggtgttggcctaccaagtggatcagatagtgacggtggagccgaatgactttgagcctgtcttgattcaacatggggaagattatgcgaccttgttgacttgtacaccgtatatgattaacagtcatcgtctgttggtacgtgggaagcggattccgtatacggcaccaattgcagagcggaatcgagcggtgagagagcgtgggcaattctggttgtggttattactaggagcgatggcggtcatccttctcttgctgtatcgcgtgtatcgtaatcgacggattgtcaaaggactagaaaagcaattggaggggcgtcatgtcaaggactaaactacgagccttattgggatacttgttgatgttggtagcctgtttgattcctatttattgttttggacagatggtgttgcagtctcttggacaggtgaaaggtcatgctacatttgtgaaatccatgacaactgaaatgtaccaagaacaacagaaccattctctcgcctacaatcaacgcttggcttcgcaaaatcgcattgtagatccttttttggcggagggatatgaggtcaattaccaagtgtctgacgaccctgatgcagtctatggttacttgtctattccaagtttggaaatcatggagccggtttatttgggagcagattatcatcatttagggatgggcttggctcatgtggatggtacaccgctgcctctggatggtacagggattcgctcagtgattgctgggcaccgtgcagagccaagccatgtctttttccgccatttggatcagctaaaagttggagatgctctttattatgataatggccaggaaattgtagaatatcagatgatggacacagagattattttaccgtcggaatgggaaaaattagaatcggttagctctaaaaatatcatgaccttgataacctgcgatccgattcctacctttaataaacgcttattagtgaattttgaacgagtcgctgtttatcaaaaatcagatccacaaacagctgcagttgcgagggttgcttttacgaaagaaggacaatctgtatcgcgtgttgcaacctctcaatggttgtaccgtgggctagtggtactggcatttctgggaatcctgtttgttttgtggaagctagcacgtttactacgagggaaataaaaagaaatgaaaggaaagctaaggctgttcctttttccggctctttgtcaactgtagtgggttgaaaaaaagctaagctcgagaaaggacaaattttgtcctttcttttttgatattcagagcgataaaaatccgttttttgaagttttcaaagtttcgaaaaccaaaggcattgcgcttgataagtttgatgagattattggtcgcttccagtttggcattagaatagtgtagttgaagggcgttgataaccttttctttatctttgaggaaggttttaaagacagtctgaaaaataggatgaacctgcttaagattgtcctcgataagttcgaaaaatttctccggttccttattctgaaagtgaaacagcaagagttgatagagctgatagtgatgtttcaagtcttgtgaatagctcaaaagcttgtctaaaatctctttattggttaaatgcatacgaaaagtagggcgataaaaatgtttatcgctgagtttacggctatcctgttgaatgagtttccagtagcgcttgatagccttgtattcatgggattttcgatgaaactgattcatgatttggacacgcacacgactcatagcacggctaagatgttgtacaatgtgaaagcgatcaagaacgattttagcacacgggaaaagttgtctagctaagtcatagtaaggactaaacatatccatagtaataattttgacgcgacatcggacggctctatcatatttaagaaagtgatctcggatgacagcttgtgttctaccttcaagaacagtgatgatatcgagcttttcaaaatcttgcgcaataaagctcatctccatctcccgattgaaacagtcactccccggactgtttcaacgtcccaggacataatctcaggaagacgcgaaaaatcatgctcaaagtgagaatcattgagcttgcgaatgacagttgaagttgaaatggccagctgatgagcaatatcggtcatagaaatcttctcaatcaacttttgcgcaattttttggttgataatacgaggaatttgatgattcttcttgacgatagaagtttcagcgaccatcatttttgaacagtgatagcacttgaaacggcgttttctaaggagaattctagaaggcataccagttgtttcgaggtaagggatcttagacggtttttgaaagtcatatttcttcaattggtttccgcactcagggcaagatggggcgtcgtagtccagtttggcgatgatttccttgtgtgtatccttattgatgatgtctaaaatctggatattagggtctttaatgtctagtaattttgtgataaaatgtaattgttccatatgattctttctaatgagttgttttgtcgcttttcattataggtcatatgggactttttttctacacaaaaataggctccataatatccataggggatttacccactacaaatattatagagccataaaagcatcaacatcttgtgtggcacgtaaaccatgatattctaagacataaccaccgacacagataattgttaaagtcagattttcctgaattaattccttatttagggcttggaagaccggtttcattttatccatgtttgtatttctccatcaatttttgaacattggttaacttagcaggtttatttaatgaaatcacatatttatgagttggagtatgctcttgaaaggcatacttcaagctaattttttgaaaacgggttagttctttggagtctagcaacttttctacatcttggtttgttaaataagaatagtcttcaaaaataacttttcgcaaatagcgaaaccaatggcttgcgttgaattgtgattgtttggatgcctgtatcatataatcgtaccaatccattgtcttcctcctataaaatttagtttatattattgtagtttatattcaaaaatgtagtttttcttaattagctcgtatctataggatgatactgaaaatcttcttgttgctttaaatcacaatcgaaaaattctgtttttcatcttagaaaagaatgtttagaaatgtaaaatgaaccttttttcttatccgaaaaccttactaaagtatataatttaggaagtcaatcctgtatgataatgtttgtactatcgtcgagtttttgcttgattgcctaacgagataaattttagaagaattttcggtgtgatttgacaagcttctgactggaaggatagttacactagtattgtttattaaaatgagcagatagagaaaatttggaatctatttgcttattatcaatcgtttttttagcttatttgtcttagattggtatagaactgagctatggattaatactcttgtatcttatcctgttcctaaatatgttggtagaaaaatgaagcagttgttacgagtgtctgtattggaaaaaattttgtctatagaattctttaaatgatatgaaggctaggaatgccaaagcactgacatatttcgtttgaatctcatccgctctctttacttgtatttgtagaaatgctatcagtaatatattcgcgaacactatgatttacaacagtgtggtcgtacatctttgtaactttattatacaacaaccatttacaggtgtaaagttgagcagtgtctttagtaaatttagggatttgttttgtcatagttttgatacctgtattcgttgtttcatgagcatttgacgtttcttttcatgtaggcatttcaacaattagaatgatatttttccgaggatgaacttatatattgtgactttttagagttatgatgcctcttgatttgactatcgctatcaatttcatccacttttacagtttcatggttttatgaaccgaaacatctaggtacaggttttagcatcaattgattgtttttgagccatatgaagttgaaacgtggagatgcttttcttgtgataacgccctattcaaagaggaataaccgtttttggagagagttcagtactatgtggcgctaaatactatatgtaaaacatatattaaacaagatttaactaaggagaattgtaaaaacaaaaatgagaatttcatataaagtttattctaggagtatgtatcttgaataaaaattgttatttaagttctgggggttatgatgaatgtttttataataataaaatgcagctagaagaaaagttattttaatataaatcactcaacatagcgagaaggcggtttcctatatggaagtcgtcttgttttcatattgtctaaatacgagatatctactacaggttatagttgatttaaacaggtctatagatttctaatatattaaggtgaaataatatcttgtaatacattgctatgttctatgaaaaaagcgacgatagctaatgcacaagctcctatacttccacgatgtttgttgtaaggtaaaatttcaatttctatattacgagtaaagggaacgaagtggagctggtcttggattttatccctgacttcatgagtgaaaggttgataattaagcaattgactgttgatatagattttatcagcaggattgatgaggaggagatttgcaatagaagtggctaataaattgactcctttatcaatttgttgacgtaaagcggagtcgcctaaattataagccgttaaaagggtgtctaaatgaatgtctttttcagtctttacaaggctttttagtacagttagttgggaatttttaaataataattgggcgtgtttgattaaccaagcatccgaaatatatgtttgtaaacaacctttttttccgcattcacaatattgcccattcaattcgacaatggtgtgtccaatttctccgatataaggatttttagaggctcctattttttcttttgtgaaaaaggaagtgtaaatacctaatccagcgtgtaggaaaataaagttatcgggggtattgtgtggattaaaaaggtattgtcctatagccatacaatcgatattattttttacaataaaaggaaaattgaatcttttaattacatttaataaattaaaagattcccatatggggttgtttgtaatgatacttccggagtctttgttataatgtccaggtattgataagccaaatccaagtaattttgtttccaaagggacgtactctatagctgtttttatcatattggtaatggtggaattgatttctgaaataggataatcttcattcaaaatttctgtctcgaaaagagttttcccttgtaagtcacatagactgagaaagatacctaggacgtttatttcaatacctccaacaacatacggaatattatctgtgatagaaatagtttttctacgtcttccagatccggaaaactcgctaaattcatcaccagtttcgtatatgagggactgttcgcttagctcttttatgatgttagtcgttgttgctggagtaagtcctgtttcattaacaatatctgtacgggatgttgctggatttcgatatagaaactccagtatagtggctctattttgtaaaaaggctgattgttttgtaatcatttgtttcctcctttggtttattttatattaaacataagaaaaaatcaattaaaattattattctatacaaagaaaaaaatattgtaaaaacaacaaaaaatatattgacaacgctttctgttagtggtatatttaatttataaaaaataaaaaaaggagttccggtgatgaacaatattttagcgtttttagaaacaaaagtcgctccgtttggtgaaaaagttggcaaccaacggcatttgaaagctattcgtgaaggatttatgatggcaatgcctttgattttagtcggctctttatttcttattctaatcagttggcctcaagaggcttttacaaattggctgaatagtgttggattgctaagtatcttgacaactatgaatcagtcaacagtagcgattatctccttggtcgcttgtttcggtattgcctacaggttgtcggaaggatatggtacagatggtccgtcggcagggatcatagccttatccagttttgtattgatggcacctcgtttttcgagtatggtttatgataaaaatggggagcaggtcaagcagttatttggcggcgcaataccattttctagcctgaatgcatcttctttgtttatggcgattactattggattggttacagcagagatttatcgtatgtttatccagcgcggaattacgataaaaatgccaagtggtgtcccagatgtagtaagtaaatcattttcagctcttttatctggttttactacttttgttttgtgggctttggtcttaaaaggtcttgaagcggcaggagttgcaggaggtctcaacggactcctaggtgcaattgttggaacaccgcttaagttaattgcaggaacgcttccaggtatgattctatgtgttattgtaaactcattcttttggttctgtggagttaatgggggacaagttttaaatgcttttgtagacccagtttggttacaatttactacagaaaaccaagaagctgtggctgcaggacaaacactccaacacattattacattaccgtttaaagatttatttgtatttattggtggcggtggagcgactattggtcttgcgatttgtctcttcctatttagtaagagtcgtgcgaataaaacattaggtaagctagctattataccgtctatttttaatatcaatacagctattctatttacgtttccaacagttttaaatccgattatgctgattccgtttattgctactcctacaatcaatgccttgattacctatgtatcaatggctgtaggattagtaccctatacaacaggtgtaatccttccgtggacaatgccaccgattataggaggcttccttgcaacaggggctagttggcgaggagctctattacaagttgttttgattttggtttctgtagcaatttattatccattcttcaaaattgcagataaacgcaatcttgaaaaagaaaaagctactgttggagggaaataagatggttatcagagtatttgatcaacagaaaaatacttattctagctttgccttagaggaattaagttactatatgaatcgggtctttaagactaacatagagcttgtcgaggagaaggaagcggatatttttgtaggattagtcaataaagaggacagaaaagaccatgttcttatctcattagacaagggtaaggggagaattgagtctaatacaattgtaggtttacttattggaatttaccgaatgtttcatgaatttggggttgtgtatactagaccagggcgcagacatgactttgttccagagttacgatttgaagattttttagataaacagctatctatagatgaaacagccagttactatcataggggagtatgtatagagggagcggattcatttgaaaatatactagatttcattgattggctacctaagattgggatgaacagttttttcatccagtttgaaaatccttactcttttttgaaacgttggtatgaacatgaatttaatccatatctaaataaagaacaattttcaaatgaattagtacaagaattgagtgataggttggataaagaattgcaaaaaagaggtcttattcatcatcgtgttggtcatggatggacaggtgaagttttaggttactcttcaaaatttggctgggaatcaggtcttagtatttcagaggagaagaaaccctatgtcgctgaaataaacgggaaacgagaattgtttaatacggctccgattttaaccagcctggatttttcaaatccagatgtagctgataagatggtagaaattatcaaggattatgccaagaaaagacctgatgttaactacttacatgtatggttgtcggatgctcgtaataatatttgtgaatgcgaaaactgtagacaagaattggtttcggatcagtatattcgtattctcaatcaattggatagggctttaacgagtgagggattagatacaaagatttgttttctgctttatcatgagttgttatgggcacctcagaaagaaaaattagataatcctgaacgctttaccatgatgtttgcaccgattacaagaacatttgaaatgagttatgcagatgtagattttgacaattccatacctacgcctaaaccttatatgcgtaataaaattatacttccgaattctcttgaggaaaatttatcttatctttttgagtggcaaaaagcatttaaaggagatagtttcgtatatgactatcctttagggcgtgctcattatggcgatttaggctatatgaaaattagtcaaactatttacagagatgtatcttatctttccaacctacatttgaacgggtacatttcgtgtcaagaattacgtgccggattccctcataattttcctaattatgtcatgggggaaatgctctggaagaagacaagaagttatgaagaattgattgaagaatacttttctgctttgtatggggaaaattggcagtctgttgttgaatatttagaaaaattatccatttattcctcttgtgattattttaatgcaattggcagccgtcaaagtgatgttttagcgaatcattattatatagcttacaatctagctgataattttttaccaattattgaggaaaatatttctaagttattaaatagtcaaaaggatgaatggaaacagctcagttatcatcgtgaatatgttgttaagatggcgaaggctttatatcttcaagcaactggaaaaacaaggcaagctcaagatgaatggagaaatgtgttgaattatatccgtgggcacgaattgctatttcaatctaatttggatgtttatcgtgtaattgaagtagcaaaaaattacgctggtttccacttataaatcataagtatagaaaatgaactaaggtattcagagaagattgatcctaaatattatgaaatttaaggatttttaagatatttagggtcaactttctatttatatcgtagcgaagtcattttaataatgatgtgtaaaagatggatcaagattgaggaggaagaaagatgaaatcaaaagaagaaataaatatgcttggttttacaattgtcgcttacgcaggagatgcaaggtcagatttgatggatgctttggcgtttgcgagagatggatattttgaacaggcaagagaattggttgagtctgcaaacgactcaatagtgtctgcccatcgagaacagactaatttattagcggaggaggcatatggagataattttgaagtgagctttattatgattcatggtcaagatactttgatgacaacgatgctattgtatgatcaggtaaagttttttattgatgaatatgaacgaattcgaaagattgaagaacatattggtttgcaatgaggattagtcatggaaaatttacaggttaaagccttaccgaaggagtttttattaggaactgctaccgctgcttatcaagtagagggtgcaactagggtagatggcaaaggaataaatatgtgggatgtttatttgcaagaaaatagtccgttcttaccagatccagctagtgatttttattatcgttacgaagaggatatagctttggcggcagaacatggtttgcaggctttgcgtttatctatttcttgggttcgtatatttcctgatatagatggggatgctaatgtattagctgttcattattaccatagagtttttcagtcttgcttaaaacataatgtgattccgtttgtttctttacatcattttgattcgcctcagaaaatgttagaaacaggggattggttgaacagagagaatattgatcgtttcatacgatatgctcgcttttgtttccaagaatttacagaagtcaagcattggtttacaatcaatgaactgatgtctcttgctgcaggtcaatatataggaggtcagtttcctccaaatcatcattttcaattatctgaagcaattcaagcgaatcataatatgttgttggcgcatgctcttgcagtcctcgaatttcatcaattagggattgagggaaaggtaggttgtattcatgctttaaagccaggctatcctattgatgggcaaaaagaaaatattttggcagctaaacggtatgatgtttataataataaatttctattagatggaacttttttgggctactacagtgaggacacgctttttcacttgaatcaaatattggaagctaataattctagctttattattgaagatggtgatttagaaattatgaagagagctgcacctcttaatacgatgtttgggatgaattattatcgttcagaatttattcgtgaatacaaaggtgaaaatagacaagaatttaattcaacaggaataaaaggacagtcttcttttaaattaaatgctctaggtgaatttgtaaaaaaacctggtattccgacaacagattgggattggaatatttatcctcaagggttatttgatatgttgcttcgtatcaaagaagaatatcctcaacatccggtcatttatttaactgaaaatggtacagcccttaaagaagttaagccagagggcgagaatgatattattgatgacagtaagagaatccgttatattgagcaacatttacacaaagttttagaggctcgagatagaggagtcaatattcaaggctattttatatggtctttgcaagatcaattttcttgggcgaatggctacaataagcgatatggtcttttctttgttgattatgaaacacagaagagatatattaagaaaagtgctctttgggtaaaagggctaaaacggaattaaggttagcgatttgactgatgtttaatatgttttaaatatgaggttgaattttttataggaggagttttatggataagctagtcgctgccattgaaaagcaacaagggaaatttgaaaaaatttctactaataactatatgatggctattaaagatggattcattgctactatgcctttaattatgttttcaagctttttgatgattattattatgattcctaaaaatttcggagtagagttaccgagtccagctattgtctggatgagaaaagtgtatatgttaaccatgggagttttgggtattattgtttcagggactgttggaaagtcattagttggaaatgttaacagaaaaatgcctcacggaaaggtaataaatgatatttctgcaatgttggcagccatatgtagttatctggtattaactgtaacgcttgtagttgatgagaagacgggatctacaagtttgtcgacaaactatttaggatctcaaggattgataacttcgtttgtcagtgcctttattactgtaaatgtttaccgattctgtattaagcgagacattactattcatttacctaaggaagttcctggggctatatcacaagcttttagagatattttccctttttcttttgttttacttattagtggtttgttagatattgtatctcggtttagtttagatgttccttttgcccaagtatttcaacaactattgactcctatttttaagggggcagaatcatatcctgctatgatgttgatttggtttatgtgtgctttgctttggtttgttggaattcatggaccatctattgtcttacctgctgttacagctttgcaactgagcaatatggaagagaatgctcaacttcttgcaaatgggcagttcccttatcattctttaacacctaatttcgggaattatatcgctgctattggaggaacgggggctacctttgttgtaccatttattttgattttctttatgcggtctaaacaattaaaatcggtaggtaaagctacaattactcctgttttatttgcggtaaatgaacctcttctatttggtatgcctgttattttgaatccctatctttttgtcccttttttgatgactccaccagtgaatgtatttctaggaaaggtctttattgatttctttggaatgaatggattttatatccagttaccttggacctttcctggtcccttgggattgttaattggaacgaattttcaacttatctcctttgtatttttatctttgattttagttgtcgacatattgatttatttgccattctgtagagcgtatgatagacagttactggtgaaagaagatattgcaagctcaaatgatattattttagaggaggatacaagtgaaataattcctggtgagatagatgaaataaaaagtaaggagttgaaagtactggttctttgtgcagggtctggaacaagtgcgcaattagccaatgcaattaacgagggggctaacttaacagaggttagagtgattgcgaattcaggagcgtacggagctcattatgatattatgggtgtttatgatttaattattctggccccacaagttcggagttattatagagagatgaaggtggatgcagaaagattaggtattcagatagttgctaccagaggaatggaatatattcatttaacaaagagtccaagtaaagccttacaatttgtattggagcattaccaagctgtgtagtaagtttttccatcttttatttgagtaaagattttgtttacagataggcttggatttaaaaacgttcccccttttttaatataagaatccctctttcacaattgtaaaaagagggattttgtattttatctcttagaccaagttctcttcataaagagaaggaggattgggtaaatctccaagcgccctgcaatcattgcaaaggataggagaatttttgagatgggactaaagattgagaaactagaagtggttcctagaataggcccgatattattgaaacagctaaagacagcgctggtcacgaccagaaaatcattgctatctaggctgacaataaagataagcgctagcaaaatcatagcatagatgacaaagtacttgagaatcttatgctgggtatctttgtcaatcaccgttttattaacatggagggtcaaaacacggtggggcgataggattgacaaaatttggtttttggcaatttttgaaaggatgaggcctcgaataatcttgagtccacctgcagttgatccagcagagccaccgattgccatgaggaaaaggaggataaactgggagaagaggggccagttggtaatatctccatatccaaaaccagttgttgtaatgatgttggaaacctggaagaaggtcatttcaaagctctttgaaaaccctgggtagaggtagagggtgttgaggctaatcaagcctgtagaaaccagtacaatgaccaagtaagccctaagctcttcatctccaaagaaggccttgatgcgacggagcatgaggtagtagtagaggttgaaatttactccaaaaaccagaactccgatactgaccagataggtaatcagtgagctgccatagtgggcaattccgtcgttatagacggtaaagcctccagttcccgctgtccccatagcaataacaaaactatcgtagagaggcataccggctagataatagatgatgacaaagagggagaagagagctagataaaggagatagagaatctgggcagtgttttttagtttggatacaaccttgccaaaaacaggacctggaacctcagccttcatcacctctaggtggctatttttggcattgtccataatagcaagtgcaaaaacaagcactcccatccctccaatcaagtgggtaaaacttcgccagaagaggagggaacggctgagaaccgaaacgtcgttcaaaatacttgctccagtagttgtaaatccagaactaatttcaaaaaaggcatcaataaggctggggatttgcccagaaaagacaaaggggagaccaccaaagaaagaccaaaggatccaacagagggcaacgatcaagactccctccttggcataaatccgttgattttttggcttctgtaaactccctgaaccgcctaacaatacgagaatccctatggtcgaaaagagggctgtaaagacttggctcgattcacggtaatagacagcaatcgcaacaggaaccaaaagaagaacagcttcaatcaaaagtaattttgaaaggaggtaacgaatcatacttttattcatttcttacctcgcgatcaagtcataaatcttggtgatgtttggcaacaaggttgttactaggagcttgtctccaacttccaacatatcctccccagttgggaaaatagtcttgccctttcgaataatggctgcaataagaaccccttttttcaatttcagttgagaaagaggtttggcagtcattttattggcttccttgatatggaattgcagggtttcgatttggccattggctagatggtgcatagcttgaaggtctgaatactgggcattaactcgaccacgaataaagtgcataatcgtatctacagcgatgcttttaggtgtgatgatacttgaaaaatcaggcgcattgataatctcgaggagactggtacgattgaccttagtaatatttttctgtacacctaccctgtcaaggaacatagatgtaatcagattttcctcatcgactcctgttagagtcgcaacggcatcatagtgttgagcactttcttccagcaggatatcttttgcggttccatctccttgaacgatgtagagatttgggaatttctcgctaaagaagctggcgatttcaggattgatttcaatgacttttgtatcgatacgactatctttgagaataccaagtagataataggcaattctacctgccccaacgatgagaaggctcttcacggcgcgtgatttaaaataattatggaagagtatcatatcgacacggttaccagtgacaaagattctatctttatcctgtacagtcatgtcaccgcttggaatgataatttgatgatccctctctatcgcacagacaatgacattaccaaattttttacgaaaatcagaaatgggcatttggcaaagaccgctggtggacttgacgacaaattccatgaggctaacgcgtccaccagcaaagcgttcgacagacagggcgttggggaagtcaatgatattcgcgatagcgcgggcagccaagagctcaggattaacgataagagaaaaaccgagaatattcttttccttgaaataagagttagaatattcagggttccgcacccgaacgatagtttctttagctcccattttcttggctagaactgctgcaatcatgttgacttcatcgtgctcagtcagggcgataaagatatcacaatcttggacgctggcttgctcaagaatggcaaaatcggccccgttaccaaggataccaatgatatcaaagcgactgacaatatgattgagaacagcttcgtcttgctcaatcagcaaaacatcatgcttttctgcaaccaaggagcgacagagggcaaaaccaacttttccccctccgacaaggataattttcataataaaacctactttttcatgatgtaactatcataccctttttcaagaaaaaatgcacctactagctaataacaagagtttttagtgaaaattcgctataaggtaaaactataccctaaccaattgaaatagctattagcgactttctctgaaatatggtatgataaaggatatacaaggagataaaatgaataataatttactggtattacaatcagactttggtctggttgatggtgcggtatcggctatgattggagtggctttagaagagtctccaaccttaaaaatacatcacttgacgcacgatatcacgccttataatatttttgaggggagctatcgtctctttcagacggtggattactggcctgagggaacgacgtttgtatcggttgtcgatccaggtgtcggttcgaaacgtaagagtgtagttgccaagactgcaaaaaatcaatacattgtcacgccagataatgggacgctttcctttatcaagaaacacgttggcattgtagccattcgtgagatttctgaggtggccaataggcgtcaaaacacagagcattcttataccttccacggtcgtgatgtctatgcctatactggtgctaaactggccagtggtcacattacttttgaggaagtagggccagagctcagtgtggaacagattgtagagcttccagtcgtagcgaccatcatagaagatcatctggtgaagggagccattgatattctggatgtgcgtttcggttcgctttggacctctatcacacgggaagaattttacaagctggaaccagaatttggtgatcgttttgaagtgaccatctatcatgctgatatgctggtctatcaaaatcaggttgtctatggcaaatcatttgcagatgtgagaattgggcaacccatcctttacatcaactctctctatcgtttaggtttggctatcaaccaaggttcctttgccaaggcctataatgtaggtgtcggttcatcttggaccattgaaataaagaaaatagaaggataaaataggagaatagtatggaaatcaaatttacaattaaacaagttgttgctgtcggaattggcgctgccctctttgtcgtcatcgggatgatcaacattccaacccctgttccaaatacaagcatccagcttcagtatgcggtacaagcgctactttctattatttttggaccgattatcggtttgcttgtcgggttgattggtcatgcaatcaaggactctcttgttggttatggtctatggtggacttggattatcgctagcggactctttggtttagttgtgggactttttagaaagtacgttcgcgtgatcaatggtgtttttgactggaaagatattcttatttttaatctcattcaactacttgcaaatgcccttgtttggggtgtcttggcaccacttggagatgttgtgatttatcaagaagcggcagaaaaagtatttgcacaagggattgttgcgggaattgccaatggtgtatctgtagctattgcaggaactcttctcttacttgcctatgcaggaacccaaactcgtgcaggaagtttgaaaaaggactaatactcaatgaaaatcaaagagcaaactaggaagctagccgcaggttgctcaaaacagtgttttgagattgtggatagaactgacgaagtcgactcaaaacatggttttgaggttgtagatgaaactgacgaagtcagtaaccatacctacggcaaggcgaagctgacgtggtttgaagagattttcgaagagtataaaatgatggggaaggctgggcaactagtctttttcgatgtttatagattagttaggcaagtaagctaggataggaatctttttggcgctaagattttaagaggagagactgcaagaagggcttgatttatgataaaatagaagtctaagaagcgaatgaagagagtaagatgaaagaagctataattgagtggaaggatttctctttccggtatgaaacacaacaagaaccgaccttgcaagggatagacttgaccatttacaagggagagaaagtcttaattgttggaccatctgggtcaggtaaatctaccttgggtcagtgtttgaatgggattattcccaatatttacaagggtcagacatatggagaatttttgataaagggtcaagtagcctttgatatgagcatctatgataagtctcatctggttagcacagttttgcaggatacagatgggcagtttattggcttgtctgtggcagaagatttggcgtttgctctggaaaatgatgtgacagccctagatgagatgaaaggtcgtgtttataaatgggctgaaaagctggaccttcttcctttactggatcagcgtcctcaggatttgtcaggtggacaaaagcagcgagtcagtctggctggtgtcttgattgatgaaagtccgattctcttgtttgatgagccactcgccaatctagatcccaagtcaggtcaggatattatcgaattgattgaccagattcataaggaagaggggacgacgactcttattatcgagcaccgtttggaggacgttctgcatcgccctgtggatcggattgtcttgataaacgatggtcgtatcctttttaatgggagccctgaccagttgcttgcgactgatttattgactcaaaatggaattcgagaacccctttatctaacgactctccgtcaattaggtgtggacttagtcaaggaagaacaattagcgaatctggataacttgtctatctcaaaaggtcaggttcagttgcagaatgaactggcaaaagaaaccccagcattgcagtcactctttagactagaggaagtatctttttcttatgatgatagaccgattttaaaatccctacatttagatattaaaaagggtgaaaagattgctattgtcggaaaaaatggagcagggaaatcaactctagccaaggctataagtagctttattcagacggaaggacgctatctttgggaaaaacaggatataaaaggcgattctgttgcagagcgggcggaacgagtaggatatgtgctacaaaatcctaatcaaatgatttcaaccaatatgatttttgatgaggtggctctagggctccgtttgcgaggtgtggatgagaaggaaattgaaacgagagtatatgaaaccttgaaaatctgtggactttatgaattccgtaattggcctatttctgccctgtcatttggtcagaaaaaacgtgtcaccattgcttcaattttggtcttaggagctgaaattattctcctagatgaaccgactgcaggtcaagatcagaagaactatactgagattatggaatttctcgaagagttacatcaaaaagggcataccattgtcatgattacccatgatatgcaattgatgctggattattcagaccgggtccttgtcatggtggatggagaattgattgccgatactgttccagccagtctgttgagcgatcctgagctgttagtaaaagccaatctaaaagaaacctccatctttaacttggctaagaaactagatgtggatccactggatttaacggcattttacaaagaaaggagagagggatgcaagctaaattaatcggttaccagcatagagatactgtgattcatcgcttgtcaggagctgggaaacttctctttttcattctggtatcattggcggccatgattagctatgataccagaatgctcttgctgattgccatcttttcagtctttctcctctatttatcagaaattcgctttaaagatgtttcctttgtagccgtttttgcgacgatatttgccgttttaaacgttttgatggtctatctcttttctcccgagtatggggttggactttatggagagagaagtgtgatttggcagggaatcggtgtctacactctaaccagccaggagctcttttatctgctaaatttggccattaagtatctttgcaccattcctctggctattatctttttgatgacaacccatcctagtcagtttgcttccagtttaaatcaaattggtgtgccctataagattgcttattctgtcagcctgaccttgcgctatattccagatttgcaggaagaattctttactatcaagatgtctcaggaggcgcgtgggatggaattatccaagaaagcttctcttatgcaacgaatcaaaggcaatctgctcattattacgcccttgatttttagctcgctagaacgcattgataccattgcgactgccatggagttcgccgctttgggaaagagaaaaaacgcacatggtatagttatcaggccttgaaaaaaggagactatattaccttgctcttggcaaccttgtttttagtagttagtttactacttatcttgcagaatcagggacgattttacaacccttggaaatagcttgaaaaaattgaaaaaatcaagtcatttctattgacaatgattctgaaagtgttatactaagaaagtagtttcgctgatttacttcaaacctgttgtgaggtaagttaacgatgccttaaccacgctgtttgctgagcttgactccgggcagtgtggctatttttttgcaatggtgaaaggaagcaagtcatgacaaatcacattgtattatttgaacctcaaattccacaaaatacgggcaatatcgcgcgtacttgcgctgcgaccaattctcccctccacatcatcaagcctatgggctttcctattgatgaccgcaagatgaagcgggctggattggattactgggataagctagagatttatttttacgagagtttggaagatttcatatctcagatgaagggaaaactctatctgatttcgaaattcgcggaaaaagtctattctgaggtggatttatcgactgacgaggaccattattttctctttggacgtgaagacaagggcttacctgaagattttatgcgagaacatcctgagaaggctctccgtattcccatgaatgatgaacatgtccgcagtctcaatgtgtctaataccgtctgcatgattgtctatgaggctcttcgccagcagaactttgcaggtcttgagctcgtccatacctatgaagtggataaattgaaataaaaaatgaaaatgaacaaaatgcttgcgcttgcaagcgttttttgttatgataaaagagtcttcagggcagggtgaaattcccgaccggcggtgactttaactaggaaatgatcttttccttttatactttgttgacaagctttgcctaaccagaagttatgcctacagcttgtcgcctagtctaaaagaaaaatctctatttccttctctttaaagaagtccgtgagcgcaagctgatgtggtgagattccacaaccgacagtatagtctggatgggagaagacgaaagaatagccttgtctgttttgatagatttatagccggattgtaaccacttgctttgtttttctttaatagagtaagagggaacttttgggatataaaaagtgagaatagatagaggaatcctttccaacttcttctgattttatagaaaattggaggaacctgttatgacaaacacacgtcgactttcgaccattgcaattctatcagccatctcatttgtgctgatgtactttgactttccgcttttaccagcggcatctttcctcaagatcgaatttagtatcttgccagtccttgtgggtctggtggtcatggatttgcctgctgctctaggagtgctcttgcttcgctcactcttgaaattgcttcttaacagccaaggagtgaatacttacattggtttgccgatgaatatcgtagctttgggagtttttgtcatcgtatttgctttgatttggaaaaaggaacggacaacccttcgtttcctactaggctctctagctggaactattggtttaaccttggccatgttggttctcaactatgtttatgctgttcctttgtacgctaagtttgctaactttgatattggaaaaattttgggactttccaactacctaatgaccatggtattaccttttaacttgattgaaggtgttatcttttccgtttcattctggttgttgtatgttctcttgaaaccaaccttaaaacattatgagagataaacaaacatttttaatgaagggcagttttgcccttttacttttcgttattcttggctacatggtcaaattttaccctgaaatgttggtcaattttgaccaatcgattcagactgccattcgaggagacttaccagattatttgactattctttttcgagccctcacacgtctgattgatatcccagtgattatcacttgggttgtcattacagcttttgtcttttatcgtaagcgatggaagatagaaagtttcttcatgctgggaaatctggctttggcaggtcttttaatcgtgacctttaaaaatatctaccagcgcccacgaccagctattttacatctggtggaggagaagggattttccttcccaagtgggcattctctagctgtaacgctgatggtagggactttgattgttattcttagtcagcggattaaagatcaggtctggagaaaaatcgtacaaatcgtccttggcctctacctagtcagtgtgctggtatcaagagtctatctgggagttcattacccatcagacgtccttgccagtctctgtgtgggcttgggagtcctgtttatcgagtttcccttttatgacaagctccgcttccaatggcgatttaaaggcaaacagaagtgagtatcgaattcccttgaggagaaagaaatgaaagtcaatatagcagatcttcatctgactcaactatatttatcagaaaagaagttgcaagatattcagatgctttaccagtcggcagaaacaatccaagtcgatccaatcagtattcttgcctttggagattgtttgctgattacagatgggcatcacagggcttatcaggctttattggcaggtcgggatacgatttctgctgagtgggatagagatggtggtgatgaactatatcatctctatgcgcaagcttgcgaggaaagaaagatttactctgtttttgatttagaagatcgtatcctagctcaagatgggtatgaagcaaaatggtataactggtgtgatggttttaatcaagcagcaactcttttgttgaaaaggtagtgcattgtgttttgttccttattataaggtcaatcattgtgaggaagcttttgcttggtatcaggatgtgaacttggtttacctcgtagatggggtgaagcttccttacagtcaagccgaccttggaagccatgtattcctatttggatcggcatggtgagcttttttggattgaagtcaaggagaagggagaatggtttccaattggggatattacactatctcaggataatctccccattgtgattgggaattccgcttaccaacatcgaggacttggaaaaaagattctaagtgctttgattgaattggctcgagtaaaaggatggaaagaattgagagtcaagaaaatctacacctacaatcatgcttctaggaggtgtttcaagtcgcttggatttgtggaaaatggagcaacagaaaaaggaatgagttttatattggaattagtctaatcctgccactttctcccccttaacctttgactattccgcaaaattatcgtaaaataaagagtaaatgataaaatgaggtcagagtctgttcgctctggcgatagtagtataaatgaggagaaacgctttggaattagaagtatttgctgggcaagaaaaaagtgaactatctatgattgaggtagcgcgtgctatcttggaacttcgtggtcgcgatcatgagatgcattttagcgatcttgtaaacgaaattcaaaactaccttggaacatcaaacagcgatatccgcgaagctttgcctttgttctacacagagttgaactttgacggtagcttcatctcacttggggacaacaaatggggtcttcgttcatggtatggtgtggacgaaatcgacgaagaaatcatcgctcttgaagaaaatgacgacgatgaagtagcaccaaaagctaagaaaaaacgtgtcaatgcctttatggatggtgattcagatgccattgactacaatgcagatgatccagaagacgaagatgcatacgaagcagatccagctctttcatacgatgatgaaaatccagatgatgaaaaaaatgaagtggaagcttatgatgcagaaatcaacgaaatcgctccagatgacttgggagaagatgtggatctcaacgaagacgacgacgagttttcagatgacgatgctgaaaccagcgaggaataagagttagctattgacaattatcctatttttaggtatcatattgtttgggcacctcttttagaggtcggggctccctagttcttagggagctatttttgttttttcaagaagttatcttcttgtattttatactcaatgaaaatcaaagagcaagctaggaaactagccgtaggctgctcaaaacactgttttgaggttgtagataagactgacaaagtcaggaacacatatctacggcaaggcgacgttgacgcggtttgaagagattttcgaagagtattagttgtgaatctggtgcagtcgtcccagattattcttattagtagggtcttgttttctatatcccctcgtagttaacaagaccttgagcattttagaaagaggaatctatgtctacgaaatatatttttgtaactggtggtgtggtatcgtccattgggaaagggattgtggcagcgagtctaggccgtctcttgaaaaatcgtggtctcaaagtaaccattcaaaagtttgacccttatatcaatattgatccgggaaccatgagtccttaccagcacggggaagtttttgtgacagatgacggagctgagacagatttggacttgggtcactatgaacgtttcatcgatatcaatctcaacaaatattccaacgtgacaactgggaaaatttacagtgaagttcttcgtaaagaacgccgtggagaataccttggggcaactgttcaagtcattcctcatatcacagatgctttgaaagaaaaaatcaagcgtgccgctctaacgaccgactctgatgtcattatcacagaggttggtggaacagtaggagatatcgagtccttgccattcctagaggctcttcgtcagatgaaggcagatgtgggtgcggataatgtcatgtatatccatacaaccttgcttccttacctcaaggctgctggtgaaatgaaaaccaaaccaacccaacactctgtcaaagaattgcgtggcttgggaatccaaccaaatatgttggttattcgtacagaagagccagctggtcaaggaattaaaaataaactggcccagttctgtgatgtggcaccagaagccgttatcgaatcgttggatgttgaacacctttaccaaattccactgaacttgcaggcacaagggatggaccaaattgtttgtgatcatttgaaattagacgcaccagcagcggatatgacagaatggtcagccatggtggacaaggtcatgaacctcaagaaacaagttaagatttcccttgttggtaagtatgtggagttgcaagatgcctatatctcagtggtcgaagccttgaaacactctggctatgtcaatgatgcagaagttaaaatcaattgggtcaatgccaatgatgtgacagcagagaatgtagcagaactcttgtctgatgcggacgggatcatcgtaccaggtggttttggtcaacgtggtacagaagggaaaatccaagccatccgctatgcgcgtgaaaatgatgttccaatgttgggagtctgcttgggaatgcagttgacatgtatcgagtttgctcgtcacgttttaggtcttgaaggtgccaattctgcagagcttgcaccagaaacaaaataccctatcattgatatcatgcgtgatcagattgatattgaggatatgggtggaacccttcgtttgggactttatccgtctaagttgaaacgtggctctaaggctgctgctgcttatcacaatcaagaagtggtgcaacgccgtcaccgtcaccgttatgagtttaataatgccttccgtgagcagtttgaggcagcaggttttgtcttttcaggagtttctccagacaatcgtttggtagaaatcgtggaaattcctgaaaataaattctttgtagcttgtcagtatcaccctgaactgtcaagccgtccaaaccgaccagaagaactctacactgcctttgttactgcagcagttgagaacagcaattagcaaaatcagaacctttgagaaaaatctcagaggttttttgcatacgatgatattgcagtatatctgaggtaggggtcctctgtatgtacctgctaccgttgaaatcaatagcgactccctcttgccctgtgctagtgaatggatttatcagtatattgaaatgaaataaaatttgaacaaattaattcggaaagccaaatcaatttctagcaaagttttaggaactggattgtatagtgaattgaaataagatgtgaacatctctatcaggaaagtcaaattaatttatagaaatattttagcagtcaagatgtactgttatagattcaatacattatacttttttaatttaatccactatagtaaaatgaaataataacaggacaaatcgatcaggacagtcaaatcgatttctaacaatgttttagaaatagaggtgtactattctagtttcaatatactatcccaaatcattcatacctctctcaactagatgtaacttacaaaacccctgacctcatgagccactttcttcctcctcatgaggtcagttttactttctgctgttccagtatcgtttttcctcgctagatttcctcaaaagggcagactcctcccttggtgcgtcacacgattttttcatctcgactgttctttaatgcatcattaacgacgcttttcttctaggtggttcataaggaacaggaagattcaggttgacttttctaatcctagaataaagtgctgaaaacaattcggaataggcatagagactagacaatttgaggagctgcttgcgtcctgttcgaacacattttcccaccacgtgaagaaaaagatggcggaagcgtttgattgttaaagtttggaagtcacctccagctagatgtttgagaaaaagatagagattgtaggcgatacagctcatcatcatacgaacttcgtttttgattaaggttgaactatccgttttatcgccaaaaaatccctccttcatctccttgatgaaattctcggcttgaccacgtccacgataaagctgaaactggtcttggcttgttccactcgtcatatttgtaacgagagaaataacatcgtagaacaagtttccttcttttcgttcagagaactggcagacacgacgcttgtgcgaccaagatcctgcttgatagagagtttctgagtaggcggagtggggcaagatggttaagtcctcatcctgtgggcaagggagggaaaggtctccaagacggctcagaacagtatttttcttgagttttatgaggtagtattgccctgttttttcaattaaatcgtataattttggggtcgcaaagccactatccattcgaaagagaagttgattaaaccgttctaaaacaggtgtgataaagctgtctgcctcttcagaacaataacgattaccaggacgaagctgggcattgaaacaataacctgtcttcccctcgaaagcataaagaggatgatagccatgagcacgatagtgggcgttataagcaacaccttcttgcttgccataagttgtgaaatgggtagaatcgatatctacaatgagttggtttagctggtgaaactgtaaaaagaattcgaccaattcaaggttgaggcatcgcaaactatggactgtttcctcgtcagttctggaaagaaaacgggataaggttggctgtgaagcaagctgccctccttccaacaattttggaaagtaggcatcagctgacaattctttacaagcatagtccgttccataacctgttaacagttgaaagaggaactggacaaggatatctgaatccgaataacgacagtagcggcgttggtcattcgttactaaatacttagaaatccgctcttttagtttcaactgggaaaaaagttcctgaaaaaagataagaccaccatactgggttaaatgacctccatcgaaagatagttggtaaaaagacttgttttggaagtgatgatttggtaaactgttcatgtgagtttcctttctttttgtgtttttttctacacttataccataaaggggaaactcttttttgtctagtaaaaaacacccattgggtgaaaaaagaaaccatccaggatctaagctaaggcaaggattctggatggtttttagatttggggtgaataattggggactatatatctgcagaatactctttcagtttcattcatcctagtcttgcttaggaaaaagtaaaaagccatccaattatgatggatagcttcttggttcttagatttgttctgcaaaaaccttttcagcaaggttcatagcgtggtctgatacacgagtgtagtgtgagatgatgtcgataaagttgaccccagcttgtgttgaacattcgcctttgttgaggcgtttgatgtgggtttttctgagaacacgttctatcttattgattgcttcatgacgttctacaagactgcgtgctttttcaatatcattgttttccacactatccagagcatctttgataaagtcactagtttggcggtaaacttcctctaattctttcaaggcggcatcagaaaattcaacatttttccgttgaagatagtcagtcagattgagtagagcctccgtgtggtctccaatccgttccaaatcacgggaggaatcaaggatattggtaagcacttcactttctttttggctgagagcttcgcttgaaagggcaatgagataacgtgttaattgctcatcgatggtgttaattgcttcttcggttttatgccctttttcagcaactttttcatccaagtcaatgatgtacttataggaaaggtcaaaggctttagcagcgtagtttcctaagtgcaagagctctttcttagcatttcctagagcgatagatggggcctgtttgatgaaatgttcatcaagatataagggttcgtatttgacaacctcgtcctctccaggaataatcttggttacaaagtaagccagagctccgataaatggaaattggacaatggtgttggtaatattaaaggttccgtgagcaaaggcgatggtcatttccggtgctagatttagcgtagcttcaaaccaatgaatcaggacagtaaaaggaactagaaaaataacgcagacaactgttccgataacgttgaaggcaacatgagctcctgctacccgtttagctgcaatattagcccctaaagaggcaatgatggctgtaatggttgtcccgatattgtcaccaaatagaactggcaaagctccctgtagatcaattagattgccggcgtagaggttttgtaaaatcccaatggtagccgaagaagcttgaattagcaaggtcaagccagtaccgacaaagacacccaaaacaggattcttacttagctcaatcatatagtccttaaagacctgtaaatccttgagtggagccattgcgccgctcatgagattgagggcaaaaaagataccaccgacaccaaagaggatgcgtccgatattattgactgtccgatttttcgtaaaaaaaagacagacggcaccgataaagagcataggtagggcatagttacctaatttaaaaccgatgagaaaggatgtgacagttgtcccaatattagcacccatgacaatcccgatagcctgacgtaaggttaagagaccggcactgaccaggccgactgtgataactgttacaccagaactagactgaattagagcagtcatcccaataccaaccagaactccaaagaaaggattactagtatatttgtcaatgtaaaaacgaaggcgatctccagcagcttgttgtaaaccgtctcccatggtcttgatgctatataagaatagccccagaccacctaaaaagtgaaataaaatttcctgccaattaatggacatttctttttcctccgaaaaataatcgcggaatatctcctattctattttaaaggataaaagtaaatctaacaagtgttaatgtcaagtttgtaaaagaaaattataattgataagtgtattatttttaagagtttttaaccttattttagatttgtgcaaacagttattggtttttgtctaaaaatgttttaggataaaaatgtgattatcatggttctagagtttgataaaaaactacagaatataaagcgctttcttgaaaacaacaaaatcaatcttttaggaggagaaaatgaagaatccattttttgaaagacgttgtcgttacagtattcgtaagttatcagtaggagcctgctcgctgatgattggtgctgttttatttgctggtccagccttggctgaagaaactgcagttcctgaaaatagcggagctaatacagagcttgtttcaggagagagtgagcattcgaccaatgaagctgataagcagaatgaaggggaacatgctagagaaaacaagctagaaaaggcagaaggagtagcgatagcatctgaaactgcttcgccagcaagcaatgaagctgcaactactgaaactgcagaagcagctagcgcagctaaaccagaggaaaaagcaagtgaggtggttgcagaaacaccatctgcagaagcaaaacctaagtctgacaaggaaacagaagcaaagcccgaagcaactaaccaaggggatgagtctaaaccagcagcagaagctaataagactgaaaaagaagtccagccagatgtccctaaaaatacagaaaaaacattaaaaccaaaggaaatcaaatttaattcttgggaagaattgttaaaatgggaaccaggtgctcgtgaagatgatgctattaaccgcggatctgttgtcctcgcttcacgtcggacaggtcatttagtcaatgaaaaagctagcaaggaagcaaaagttcaagccttatcaaacaccaattctaaagcaaaagaccatgcttctgttggtggagaagagttcaaggcctatgcttttgactattggcaatatctagattcaatggtcttctgggaaggtctcgtaccaactcctgacgttattgatgcaggtcaccgtaacggggttcctgtatacggtacactcttcttcaactggtctaatagtattgcagatcaagaaagatttgctgaagctttgaagcaagacgcagatggtagcttcccaattgcccgtaaattggtagacatggccaagtattatggctatgatggctatttcatcaaccaagaaacaactggagatttggttaaacctcttggagaaaagatgcgccagtttatgctctatagcaaggaatatgctgctaaggtaaaccatccaatcaagtattcttggtacgatgccatgacctataactatggacgttatcatcaagatggtttgggagaatacaactaccaattcatgcaaccagaaggagataaggttccggcagataacttctttgctaactttaactgggataaggctaaaaatgattacactattgcaactgccaactggattggtcgtaatccttatgatgtatttgcaggtttggaattgcaacagggtggttcctacaagacaaaggttaagtggaatgacattttagacgaaaatgggaaattgcgcctttctcttggtttatttgccccagataccattacaagtttaggaaaaactggtgaagattatcataaaaatgaagatatcttctttacaggttatcaaggagaccctactggccaaaaaccaggtgacaaagattggtatggtattgctaacctagttgcggaccgtacgccagcggtaggtaatacttttactacttcttttaatacaggtcatggtaaaaaatggttcgtagatggtaaggtttctaaggattctgagtggaattatcgttcagtatcaggtgttcttccaacatggcgctggtggcagacttcaacaggggaaaaacttcgtgcagaatatgattttacagatgcctataatggcggaaattcccttaaattctctggtgatgtagccggtaagacagatcaggatgtgagactttattctactaagttagaagtaactgagaagaccaaacttcgtgttgcccacaagggaggaaaaggttctaaagtttatatggcattctctacaactccagactacaaattcgatgatgcagatgcatggaaagagctaaccctttctgacaactggacaaatgaagaatttgatcttagctcactagcgggtaaaaccatctatgcagtcaaactatttttcgagcatgaaggtgctgtaaaagattatcagtttaacctaggacaattaactatctcggacaatcaccaagagccacaatcgccgacaagcttttctgtagtgaaacaatctcttaaaaatgcccaagaagcggaagcagttgtgcaatttaaaggcaacaaggatgcagatttctatgaagtttatgaaaaagatggagacagctggaaattactaactggctcatcttctacaactatttatctaccaaaagttagccgctcagcaagtgctcagggtacaactcaagaactgaaggttgtagcagtcggtaaaaatggagttcgttcagaagctgcaaccacaacctttgattggggtatgactgtaaaagataccagcctaccaaaaccactagctgaaaatatcgttccaggtgcaacagttattgatagtactttccctaagactgaaggtggagaaggtattgaaggtatgttgaacggtaccattactagcttgtcagataaatggtcttcagctcagttgagtggtagtgtggatattcgtttgaccaagccacgtaccgttgttagatgggtcatggatcatgcaggagctggtggtgagtctgttaacgatggcttgatgaacactaaagactttgacctttattataaagatgcagatggtgagtggaagctagctaaggaagtccgtggtaacaaagcacacgtgacagatatcactcttgataaaccaatcactgctcaagactggcgcttgaatgttgtcacttctgacaatggaactccatggaaggctattcgtatctataactggaaaatgtatgaaaagcttgatactgagagtgtcaatattccgatggccaaggctgcagcccgttctctaggcaataacaaggtacaagttggctttgcagatgtaccggctggagcaactattaccgtttatgataatccaaattctcaaactccgctcgcaaccttgaagagcgaagttggaggagacctagcaagtgcaccattggatttgacaaatcaatctggtcttctttattatcgtacccagttgccaggcaaggaaattagtaatgtcctagcagtttccgttccaaaagatgacagaagaatcaagtcagtcagcctagaaacaggacctaagaaaacaagctacgccgaaggggaggatttggaccttagaggtggtgttcttcgagttcagtatgaaggaggaactgaggacgaactcattcgcctaactcacgcaggtgtatcagtatcaggttttgatacgcatcataagggagaacagaatcttactctccaatatttgggacaaccggtaaatgctaatttgtcagtgactgtcactggccaagacgaagcaagtccgaaaactattttgggaattgaagtaagtcaggaaccgaaaaaagattacctagttggtgatagcttagacttgtctgaaggacgctttgcagtggcttatagcaatgacaccatggaagaacattcctttactgatgagggagttgaaatttctggttacgatgctcaaaagactggtcgtcaaaccttgacgcttcattaccaaggccatgaagttagctttgatgttttggtatctccaaaagcagcattgaacgatgagtacctcaaacaaaaattagcagaagttgaagctgctaagaacaaggtggtctataactttgcttcatcagaagtaaaagaagccttcttgaaagcaattgaagcggccgaacaagtgttgaaagaccatgaaactagcacccaagatcaagtcaatgaccgacttaataaattgacagaagctcataaagctctgaatggtcaagagaaatttacggaagaaaagacagagcttgatcgcttaacaggtgaggttcaagaactcttggctgccaaaccaaaccatccttcaggttctgccctagctccgcttcttgagaaaaacaaggccttggttgaaaaagtagatttgagtccagaagagcttacaacagcgaaacagagtctaaaagatctggttgctttattgaaagaagacaagccagcagtcttttctgatagtaaaacaggtgttgaagtacacttctcaaataaagagaagactgtcatcaagggtttgaaagtagagcgtgttcaagcaagtgctgaagagaagaaatactttgctggagaagatgctcatgtctttgaaatagaaggtttggatgaaaaaggtcaagatgttgatctctcttatgcttctattgtgaaaatcccaattgaaaaagataagaaagttaagaaagtatttttcttacctgaaggcaaagaggcagtagaattggcttttgaacaaacggatagtcatgttatctttacagcacctcactttactcattatgcctttgtttatgaatctgctgaaaaaccacaacctgctaaaccagcaccacaaaacacagtccttccaaaacctacttatcaaccgacttctgatcaacaaaaggctcctaaattggaagttcaagaggaaaaggttgcctttcatcgtcaagagcatgaaaatactgagatgctagttggggaacaacgagtcatcatacagggacgagatggactgttaagacatgtctttgaagttgatgaaaacggtcagcgtcgtcttcgttcaacagaagtcatccaagaagcgattccagaaattgttgaaattggaacaaaagtaaaaacagtaccagcagtagtagctacacaggaaaaaccagctcaaaatacagcagttaaatcagaagaagcaagcaaacaattgccaaatacaggaacagctgatgctaatgaagccctaatagcaggcttagccagccttggtcttgctagtttagccttgaccttgagacggaaaagagaagataaagattaaatatcgaaaaatcttgtgaaatctttccttatatttccaaagtgtgatataatagtttcgaataaaataaataaaggagtttttgtaacatggcaaaacttactgttaaagacgttgacttgaaaggtaaaaaagtcctcgttcgtgttgacttcaacgtaccattgaaagatggcgtaatcactaacgataaccgtatcacagcagctcttccaactattaagtacatcatcgaacaaggtggacgtgcaattcttttctctcaccttggacgtgtgaaagaagaagctgataaagctggtaaatcacttgctcctgtagcagctgacttggcagcaaaacttggtcaagatgttgttttcccaggtgtcactcgtggtgctgaattagaagcggcaatcaacgctcttgaagatggacaagttctcttggttgaaaacactcgttacgaagatgttgacggcaagaaagaatctaaaaacgatcctgaacttggtaaatactgggcatcacttggagatggtatcttcgtaaacgatgcattcggtacagctcaccgtgcacacgcatctaacgttggtatctcagcaaacgttgaaaaagcagttgctggtttccttcttgaaaacgaaattgcctacatccaagaagcagttgaaactccagaacgtccattcgtggctatccttggtggttcaaaagtttcagacaagatcggtgttatcgaaaacttgcttgaaaaagctgataacgtccttatcggtggtgggatgacttacacattctacaaagcacaaggtatcgaaatcggtaactcacttgtagaagaagacaaattggatgttgcgaaagctcttcttgaaaaagcaaatggtaaattgatcttgccagttgactcaaaagaagctaacgcatttgctggttacactgaagtgcgtgacactgaaggtgaagcagtttctgaaggcttccttggtcttgacatcggtccaaaatctatcgccaaatttgacgaagctttgactggtgccaaaacagtcgtatggaacggacctatgggtgtatttgaaaacccagatttccaagctggtacaatcggtgtgatggacgctatcgtgaaacaaccaggagttaaatcaatcatcggtggtggtgactcagctgccgcagcgattaaccttggccgtgcagacaagttctcatggattagtacgggtggtggagcatcaatggaacttcttgaaggtaaggttcttccaggacttgcagccttgacagaaaaataagattttataaataaatcaaagaagagagggatgaaagttcctcttttcttttgcttaaaataaaaacgcttcctctcaactattactcataaaaatcaccgatttatgataaaatggaaatagaaagttgagattatgagttattttaaaaaatataaattcgataaatcccagttcaaacttggtatgcgaacctttaaaacaggtattgctgtttttctagttctcttgatttttggcttttttggctggaaaggtcttcaaattggtgctttgacagccgtttttagcctgagggagagttttgatgagagtgttcattttgggacttcgcgtattctaggaaatagtatcggtggactctatgccttggtcttcttcttattaaatacctttttccacgaagccttttgggtgaccttggtagttgttccaatctgcaccatgttaaccattatgacaaatgtagccatgaataacaaagcaggggttattggtggtgtagcagctatgttaatcattaccctatcaattccaagtggtgagacaattttgtacgtgtttgtgcgtgtattagaaacgtttatgggagtttttgtcgcaattatcgtaaattacgatattgatcgtattcgtctctttttagagaaaaaagaaaaataatgttacattttataacattatcaattgacgtttgtctttttttagactataatagacagaaagaaggaaattgtaaatgaaggaaaaagaatttcgccgaaatatggctgtttttcctatcggcagtgttatgaagttgaccgatctatcggcgcgtcagattcgttattatgaagatcaagagttgatcaagcccgatcgaaacgaaggaaatcgtcgcatgtattccttgaatgacatggatcgtctgcttgaaatcaaagattatatctctgaaggttataatatcgctgccattaagaaaaaatatgctgaacgtgaagcgaaatccaagaaagcggttagtcagactgaagtacgtcgtgcacttcacaatgaactcctccaacaggggcgttttgcttcagtacagtcaccttttggtcgcggttaggcaaccgcaagtagtcatagattaaggagaaaacttatgccaatcacagctgcagatattcgtcgtgaagtcaaggaaaaaaatgttacctttattcgtcttatgttctcagatattttgggaaccatgaaaaacgtcgaaattcctgctacagatgaacagttagataaggtcttgtcgaacaaggttatgtttgatggatcttctattgaaggttttgtacgtatcaatgagtcggatatgtacttgtacccggacttggatacatggacagtcttcccttggggagatgaaaatggaagtgttgcaggtctgatctgtgatgtctatacaacagaaggtgaaccatttgcgggtgaccctcgtggtaatttgaaacgagctcttcgtcacatggaagaagttggattcaaatccttcaaccttggtccagagccagaattcttcctatttaagttggatgaaaatggggacccaacacttgaagtgaatgacaagggtggctactttgacttggcacctactgaccttgcggacaacacacgtcgtgagattgtgaatgtcttgaccaaaatgggatttgaagtagaagcgagtcaccacgaggttgcggttggacagcatgagattgactttaagtacgatgaagttctccgtgcttgtgataagattcaaatctttaagcttgttgttaaaaccattgctcgcaaacacggactttacgcaacatttatggcgaagccaaaatttggtattgctggatcaggtatgcactgtaatatgtccttgtttgatgcagaaggaaataacgccttctttgatccaaatgatccaaaaggaatgcagttgtcagaaacagcttaccatttcctaggcggtttgatcaagcatgcttacaactatactgccatcatgaacccaacagttaactcatacaaacgtttggttccaggttatgaagcgcctgtttacattgcttgggctggtcgtaaccgttcgccacttgtgcgcgtacctgcttcacgtggtatgggaactcgtcttgagttgcgttcagtggatccaatggcgaacccttacgttgctatggctgttcttttggaagttggtttgtatggtattgaaaataaaatcgaagcaccagctcctatcgaagaaaatatctacatcatgacagcagaagagcgcaaggaagctggtattacagaccttccatcaactcttcacaacgctttgaaagctttgacagaagatgaagtggttaaagctgctctcggagatcacatctatactagcttccttgaagccaaacgaatcgaatgggcaagttatgcaaccttcgtttcacaatgggaaattgataattatttagacctttactaatactaatatagaagaaagattgcctgtgggtaaacagtcacacagcagtctaagccatcaaatacctataacccttaaaatagcgatttcggtcgctatttatttttcgaaaaatcctcttgactcttttgcgaattagatttatcatcagacgtgtagaagaaaattaaggagtcactatggaaaaattcaatttcaaaaacaatatcgggcaagaaaacaagttacttcaaatcgaaatctacaagtttactaacttttgcaagcttcaaaattacacatctgtaaatattttttcgaaagatatatttgaagccatagtaaattgagactagaatagtacactacatctgctaaaaatttctagaaactaatttaactttcctaatcgatttgtttacatcttatttcaatctactatattatctcaataaatgatgatggcgactgttttgtttgtgcttgtcgatttttgaatcctgatcgagcggaagaatatttctgccgaggttgccaaggggaaaatcctgaagatattgaattttatgatgaacaattacaggcagaaaaggtggaggatttgaatattcgattggaagtaaaaaattgaattatctacaatctcatcaacaataaacctatttcaaccccattatctataggcgtatttttacgcctttttatatacttgaagcacataagaaacattatgggaagtttgctgatggaagcactcaagaaattgatgttccttatgatattcctgatacttgggagtgggtgaggataaaatcaatttattggaattttgggcaaaataagccagagaaatcctttaggtatatagatacgtctagtattgatagaaaaaagaacataatcaactacaaaaatctacaatatctttcacctgaacaagcgccttcccgtgctagaaaattagtttcgcagaatagtgtcttattttcaacagttagaccatatctaaaaaatattgctgtagttagagaacttaaagagtatttgatagctagtacagcatttattgttttggatactttacttaacgaaacatatttgaaatattatttattatcagataattttatcaatcgtgttaataataaatctactggaacaagttatcctgcaatcaatgattataattttaatctattattaattgctctccccccactatccgaacaacaacgaatagtagaagcaatcgaatcagctttagaaaaagtagatgaatatgctgaaagttataatagactagaacagctagataaagaatttccagataaactaaaaaaatctattcttcaatatgctatgcaaggaaaattagttgaacaagacccaaatgatgaatcagtcgaagttttacttgaaaaaatacgagcagaaaaacaaaaactctttgaagaaggcaagattaaaaagaaagatttggacatttctattgtttcccaaggagatgataactcttattatgaggaagtaccttgtgaaataccagaaagttgggaatgggtgaggttaaacgatataacctcctacattcaaagagggaagtctccaaaatattcaaatattcctatataccctgtgattgctcagaaatgtaatcaatggtctggcttttctattgacttagcaagatttattgatcccgaaacagttcatagttaccagaaagaaagattactaagagatggtgatttaatgtggaattcaacaggtctaggtacgttaggacgattagctatttaccatgaaaataaaaatccttatggctgggctgttgcagatagccatgttacagttataagagtcttatcgggggttattaattgccatttcatctataattttctttcctctcctattgttcagtcagttattgaagaaaaagcgtcgggtagtacaaaacaaaaagaattattaacgaaaactataaaagaatatttaatccccctcccaccccttcctgaacaatccagaatcgttgataaaatcgaacaatttttcgcccatattgacgcactaatttagtataatagttttacgtgcggtggaatttctatcaaacataagataggagttttacgttgaaagattttgaattacatttgaagaaagctggtttagctgaaaatactgtgcgttcgtacctttatggtgttcgatttttcttggagaattacgaactcaaaatggaagatttatttgaatacaaaggatatttattagacaattttaaacctaaaactgtcaatttgcgactacaaggagtaaataaatatctggcttttattggtcatgatgatttgaaattaaaatttgtcaaagtacagcaaaaaccgtttttagaagatgtcattagccatgctgattacctttttcttaaacgtagtttgaaaaaagatggtattttaaaatggcattttgtcgtttggtttttaggtgcaactggggctcgtgtaagtgaacttattaaactaaaagtagagcatgtagaaatcggttattttgacatttactcaaaaggtggtaaaattcgtagactgtacattcctaaaaaattaagaaatagttgtcttagttggttagaatcagaaaatcgccgaagtggttatttatttttgaataaatttaacgaaccaattacagcaagaggagttgctcaacagttaaaaaattatgctgataaatacaaaatgaatcctaaagtaatttaccctcattcttttaggcatttatttgctaagaattttttagcgaagtataatgatattgccttgcttgcagatttgatgggacacgaaagtatagaaactactcgaatttatctaaggaaaacagctactgaacaacaaaatattgtagataaaattgttaattggtaaaaaataacaggtggtcaaactgactacctgctatttttgtgattatggctcttattatgggaatatacctatgaattgggttgttataaaaataaaagatattttttcaataaatacaggtctttcttacaagaagggcgatttaagcattaataataaaggtgttagaattatacgtggtggtaatattaagcctttagaattttctctgttggataatgattactacattgatacacaattcatctcctctgagcaagtttatttaaaacataatcagctaataacacctgtatcaacctctttagaacatattggaaagtttgcaagaatcgataaagactatgatggtgttgtggctggtggatttattttccaattaacaccattcgaaagttcagagattatttcaaaatttctattatttaacttgtcctctccgttattttataaacaattgaaagcaataactaaactatcaggtcaagctttatataatattcctaaaactacactgagcgagctattaattccgttagctccttttgaggaacaggaacttattactcaaaaagttgagaaactttttgaaaaagtaaatcaactttgaaaatgattcttttcatctcttcatgattagaaatagggattaataattcggagatactggtactatttaatgttttccctttgatagcatcttttgaatcacctaaagtagagataagtggcaaaaatatcattaagtaatctctgataatattttctttattagcataggggaatatcgatataatggcttcattatgagtggcaggaatatccaatatggcaacttttccaatagataatttaaaactcattaataaagttcctttaggtgaaatgtctattttctttgattttaatgctaatttagaaatagattctctcgcattagttacataaccagatataggcatatctgatatagatacccaaggtatttcagttccccaaaaagtagcttcactgcgtggaggagtttttcctattctgaagttaactaggctagcaaatttaatatatctccatgcttctgggatttcatatataggataagaggttgtttcgtctttgttcccataataagagttatcatctccttgggaaacaatagaaatgtccaaatctttctttttaatcttgccttcttcaaagagtttttgtttttctgctcgtattttttcaagtaaaacttcgactgattcatcatttgggtcttgttcaactaattttccttgcatagcatattgaagaatagatttttttagtttatctggaaattctttatctagctgttctagtctattataactttcagcatattcatctactttttctaaagctgattcgattgcttctactattcgttgttgttcggatagtggggggagagggataagaatagaagcaactttatcactattcaagtttttcacaacagctccactaattagagatagaaattgagaataaactacatttgatgaaagaatatagaataggtaatctttatttaatgagttttcatagttcgaaatagccaaccatccatcgtgtattgcaccatcaacattcaaaatataaggtctaccaaaactcatagaattagttaacaaaaatgtacctttttttacaaatctagttttgttaagccctgattttttgattttttctttaacattatttatatacttttcacccttttcagtatcacctatttttatccaatttattccatctacttcagaagtaagataatctttgattggtcgtggagagccacctctgacaatttcaaccaatgtagaaaacctcacccactcccaagtatcaggaatatcataaggaacatcaatttcttgagtgcttccatcagcaaacttcccataatgtttcccatcatcaccacgaaatatctcagtttcctttttatctcgtttgatttttccttcactgataagtttttctttttcagctttaattctctttaataattcacttgcaggttcgtcattgggattttgcggcactaatttcccttccatcgctctttggagaatacttgctttaagttgttctggtgtcattatttgtcctccaacaactgcaaaatatcagctaatacattatcaatcttatgatttaaagttgctctttccgcttgataattctgaatcaactcaaagggatttaagatttcctcttcctcttttggaaagtcacactggtctaaattataattcaactcagccaattcactaggtgtaaatgatttagatttgtagaacttaccttccagaatctcttcacgattttcccaccagtcacgaacaggattgaagtgttctgacttcatcggcttagttttcgagaaatttttataaccatctggcatatctaaacgataaaaccaagtttcttctgttttctttgttttatcaaagaaaagaatgttcgtatggattcctgtatacggtgcaaagacactatgaggcaacctaataatcgtatgcaagttgaactcatctaccagtttttgtttcaagcgagtttttacaccttcaccaaatagaaaaccatcaggtaaaataactccaacacgaccattttctttcaaacgatacataatgacagccataaataaatcagctgtttcagaactccgtaattctgctggaaagttattttttattgtttctaattctgaccctccaaaaggtggattcatcataataatgtcaaatttttcatcatccgtatattcacgaacatttttctccaaagtatttccatgaacaattttagggtcatcaatttcgtgaagaaacagatttgtaactgctaaaagatgaggaaatgctttcttttcaataccaaaaacagctgtattatattttttggtatcttcactagttttacgttgactacttaaacggttcagagtcgaagtcaagaagcctcctgttccgcaagcaaggtctgccattgattctccaagttttgggtcaagaacttcggcaataaaatcagtcgctgcacgtggcgtataaaattctcctgagttcccagcattttgaatatctttaagaattttttcgtaaatatcattaaacgaatgacgatcttcagggctattgaaatcaacttcatcaataacattgatgacttggcgtaacaagacgccatttttcatatagttgttcgcatcttcaaaagctgatttaacaatcgtttttcgaataggcatatttgaagttatttcaagctctttcaactctttgaataacttgttattgacaaaatcaagtaattcatcgcctgtcaatacccgttccccattttgagcatgagcccaatttcgccattttaattcctctgggataattgactcatactcgtcttcttctaattcccaaaccatttcacggctatcataaatttttaagaataataaccaagacatttgctcaatacgttgagcatcaccattaacaccagcatcgtttcgagtgatatcttgaattctttttacaaatgatgtaattgacatactttcctttcattaagctactgtaaatagctcttgctccaattctttaattgcttgtaaatatcgttttttatctccaaaataagtattgatgattttgaaggttccaccatatatctgaaattctggaagttttaatgtttcaatgctttcgagttctccaatacctttatccatgtatttgttcagtaaaatttccaaaacagcacgcgcttcctcactatatttatataaatatccgctttgtttgagtttattgatacgttccgttttggttaattctttttgaccataggcaagttttaggagtaaatcaaaatcatcgatttcttgttctgatattccctccgactctcgaatagcatctagataaactccttttttataaagttcgtctaagataagcttcttcttatctgccgtatgccaaactgtgataaaatcgttcaaagtggcgtagctacctaagatattctttcgagtgtagtcggtcaggctttcggtaatcagtttcccgttttcatccaatacttgaacagtagaattaagaatggtaacctgcttgtctgtaacgatatatttttctactgggtcaccttcctcatctacgaaaccgggcgtagaaccactgactgttttcgcacctgtttctagcaccttcactggatcaccatcaaaatcagggtcagcaaacaaattggtaacatttcgaaaatcaataatcgtaaaaaattctttccccttttgaggataaagacgtgtgccacgaccaataatttgtttaaattcagtcatggattggatattagagtctaaaacaatcaaacgacatgttttagcattaactcctgtcgttaataatttagacgttgttacaatagcgggaaaattagaattgacatccataaagttatccagttgagcttttccttcagcgttgtcaccagttacttgcatgacataacgatagtcttcttggactaagtctagattctcttttacaagtgcagcacgcattcgctcggcatggtcaatatcaacacaaaaaacaattgttttatcaaatcgtgcattgttttgcttcatataatcagaaacaaacttggcaactctttgcgttctatcatcaatgacaatggttttatcaaaatctttcctgccgtagtacctatcttctattaattgtccgttagcatcaacttttccagtttctggacgataaccatccacatccacatctaaattaaccctcataacacgatatggagccaaaaaaccatcctcgattccctgttttaaactataagtatagattggctcaccaaagtattccgtattggaagcattcttggtttctttaagagtagcggtcatcccaatctgtgtcgcagaactgaaataatcaattaccttacgccagttactgttttccttagctgaaccacggtgcgcttcatcaattacgattaaatcaaagaagtctttgtcaaatttttgataatgtgtttcagttccatcttcaccagttagttgctgataaagccctagataaatttcaaaagaatttaatttttcaggagcagtcaaaagttttggtgtaattttcgtcattaccttttcgaatggcctaaagtcttcagccatcgtttggtctactaagatgtttctatctgctaagaataaaactcgtttagccaaaccagcttttcgaaggcgatgaataatttgaaaagccatgaacgttttccccgttcctgttgccatcacaaacattactcgtttttgtcctctggcaactgtttcaatagtacggttgatagctatttgctgataatagcgtggcgttttcattgagaaggcgtctgtatagtatggagttgagatagcttctgtaatttcgtacgtcaatcctttttccttcgtcatacgagaaaataattcttcacgagtagggaattcgtctaactccagctcacgttcttctctcgtgatacggtcgtgttcaataaagccatcaccattcgaagaataaacaaatggaacatctaaaatctctccatattcaatagcttgttgtaatcctgctcgaacgctgtgtttattatcctttgcctcaacaattgcaattcgagttccaaattggtaatacagtgaatagtctgatttttttccttctttacgacgagccttatctcctctaacttcaattcgaccatcagtgaagtattcttcgtaagcgatatgctcaccatttttccatcctttggatacaatagcaggagtgatgaaatttgctttaatatcctcctcactcatttctttcttagactttataaactcaaccatattgaaccctccgcattctaaaaatctacttctccataaaataaactatcagaacaaattatacttctattatatcacacttataaaaatactctgctaaattgttgaaaataagtatgcaatatactttcgcatcgcgtcagattatctccgcataacaccgctatttttcgctgttttcggcaggcgacttattatcattctataagcactttcagtcgggctggtgatctatttttcaaaaataaataatcacatttaaacattttgaaagtataaaatatctacatcagccgttcaaaaactggcgtaaattttgccataatattttcgtttaaataaagatttttttatgccaaacggattttaacaatgcggatgcttcctattttatttctctttttagctctactaccgtttttctcaaagtttgtcactggaggtagttctttcagttggaaagtgtttttgattttcataatagattgggttttattgatagtttttgcgattcagatttcttatattttttggagattgagtcaaaagtggaaagaattatctaataaataacgccaggcatgttttctaattttggggtaagacaatgaatagcagagtagaatttcggattttcaccattgttgatttggacaaggaagaagaacatttacatgagatgcatttgaaaggttggaggtatagaacgagtcgttttggtttgttctattttgaccaatgtcaaccagacgatgtcatctaccgtatctatgattctagatttcttaaaaaagtataagcatgaactgcaagattttagagatagaggttgggaattgataggagcaggttcttgttcgattcttcgtaaatcgtcttctgatttacttccagaggatcaagtctatatgagtaaagggctcaaatgggaagttatgcgatctagacttcgttcctgtacagctactttctcaggtggtcttgttgtttgtatgagtttgtttagagaggatctttctatgtctttctttcttatttttgttttatatgcttttctgatttcttatctaatttatggttatttcagactaaaaaggaaataccgagtagatgaatagcaaggttctaggtcttcagattgatttttagcactcttgataaaagagtgctaattttttgagtttttgtcttgacattctcttctaagggtgtataatagaatcatgagttagcacttggatgcattgagtgctaattgatcagacagagaggagtgatgagatggttacagagcgtcagcaggatattttaaatctgattattgacatctttaccaaaacgcacgaacctgtcggatcaaaagccttgcaagagtctattaactctagcagtgcaaccattcgtaatgacatggcggaactagaaaaacaagggttgcttgagaaggctcatacttcaagtggtcggatgccaagtgttgctggttttcagtactatgtgaaacactcactggattttgaccggctggctgaaaatgaggtatatgagattgtcaaagcctttgatcaggaattcttcaaattggaggatattctgcaagaggctgctaacttactaacagacctgagtggctgtacggtagtggcactggatgttgagccgagcaggcaacgtttgacagcctttgatatcgttgttttggggcaacatacagccttggcggtatttaccctagacgagtcgcgaacggttactagtcagtttctgattccaaggaacttcttgcaggaggatttgctgaaactgaagagcatcattcaggaacgtttcctcggtcacaccgttttagatattcactacaagattcggacggagattccgcagattatccagcgttactttacaacaacggataatgtcatcgatctctttgaacacatctttaaggaaatgttcaacgaaaacattgtgatggcgggcaaggtccatctcttgaattttgccaatctagcagcctatcagttctttgaccaaccgcaaaaggtggccttggagattcgtgaggggttgcgtgaggatcagatgcaaaatgttcgtgttgcagacggtcaagagtcctgtttagctgacctagcggtaatcagtagtaagttcctcattccttatcggggagttggaattctagccattatcggtccagttaatctggattaccaacagctaatcaatcaagtcaatgtggtcaaccgtgttttgaccatgaagttgacagatttttaccgctacctcagcagtaatcattacgaagtacattaagattgaaatcattaaaggaggcgaacatggcccaagatataaaaaatgaagaagtagaagaagttcaagaagaggaagttgtgaaaacagctgaagaaacaactcctgaaaagtctgagttggacttggcaaatgaacgtgcagatgagttcgaaaacaaatatcttcgcgctcatgcagaaatgcaaaatatccaacgccgtgccaatgaagaacgtcaaaacttgcaacgttatcgtagccaggacttggcaaaagcaatcttaccatctcttgacaaccttgagcgtgcacttgcagttgaaggtttgacagatgatgtgaagaagggcttggggatggtgcaagaaagcttgattcacgctttgaaagaagaaggaattgaagaaatcgcagcagatggcgaatttgaccataactaccatatggccatccaaactctcccagcagacgatgaacacccagtagataccatcgctcaagtctttcaaaaaggctacaaactccatgaccgcatcctacgcccagcaatggtagtggtgtataactaagatataaagcccgtaaaaagctcgcagtaaaaataggagattgacgaagtgttcgatgaacacaagaaaatctatcttttttactcagagcttagggcgtgttcgattcggcaattctgacggtagctaaagcaactcgtcagaaaacggcaatcgctatggcgtttgcctagcttccttactaactcgtcgtcgaaataaaatcgatttcgactcctcgtgtcgcaatttacataatagaaaacttgtccgaaacgacaataaactatgaagaaagataaaatatgtttggctttgtaatagtgagcgaagcgaaccaaacacgatactcttcgccgtggcgctatttgcgcaaattttgagaccttaggctcaaagtttagtcaaagagattgacgaagtcaagctctgacggcgtcgccactgtcgccacttaagaagagtatcaaaaagaaaaatagaaaattaactaacaaggagaaaaacacatgtctaaaattatcggtattgacttaggtacaacaaactcagcagttgcagttcttgaaggaactgaaagcaaaatcatcgcaaacccagaaggaaaccgcacaactccatctgtagtctcattcaaaaacggagaaatcatcgttggtgatgctgcaaaacgtcaagcagttacaaacccagatacagttatctctatcaaatctaagatgggaacttctgaaaaagtttctgcaaatggaaaagaatacactccacaagaaatctcagctatgatccttcaatacttgaaaggctacgctgaagactaccttggtgagaaagtaaccaaagctgttatcacagttccggcttacttcaacgacgctcaacgtcaagcaacaaaagacgctggtaaaattgctggtcttgaagtagaacgtattgttaacgaaccaactgcagcagctcttgcttatggtttggacaagactgacaaagaagaaaaaatcttggtatttgaccttggtggtggtacattcgacgtctctatccttgaattgggtgacggtgtcttcgacgtattgtcaactgcaggggacaacaaacttggtggtgacgactttgaccaaaaaatcattgaccacttggtagcagaattcaagaaagaaaacggtatcgacttgtctactgacaagatggcaatgcaacgtttgaaagatgcggctgaaaaagcgaagaaagacctttctggtgtaacttcaacacaaatcagcttgccatttatcactgcaggtgaggctggacctcttcacttggaaatgactttgactcgtgcgaaatttgacgatttgactcgtgaccttgttgaacgtacaaaagttccagttcgtcaagccctttcagatgcaggtttgagcttgtcagaaatcgacgaagttatccttgttggtggttcaactcgtatccctgccgttgttgaagctgttaaagctgaaactggtaaagaaccaaacaaatcagtaaaccctgatgaagtagttgctatgggtgcggctatccaaggtggtgtgattactggtgatgtcaaggacgttgtccttcttgatgtaacgccattgtcacttggtatcgaaacaatgggtggagtatttacaaaacttatcgatcgcaacactacaatcccaacatctaaatcacaagtcttctcaacagcagcagacaaccaaccagccgttgatatccacgttcttcaaggtgaacgcccaatggcagcagataacaagactcttggacgcttccaattgactgatatcccagctgcacctcgtggaattcctcaaatcgaagtaacatttgacatcgacaagaacggtatcgtgtctgttaaggccaaagaccttggaactcaaaaagaacaaactattgtcatccaatcgaactcaggtttgactgacgaagaaatcgaccgcatgatgaaagatgcagaagcaaacgctgaagccgataagaaacgtaaagaagaagtagaccttcgtaatgaagtagaccaagcaatctttgcgactgaaaagacaatcaaggaaactgaaggtaaaggcttcgacgcagaacgtgacgctgcccaagctgcccttgatgaccttaagaaagctcaagaagacaacaacttggacgacatgaaaacaaaacttgaagcattgaacgaaaaagctcaaggacttgctgttaaactctacgaacaagccgcagcagcgcaacaagctcaagaaggagcagaaggcgcacaagcaacagggaacgcaggcgatgacgtcgtagacggagagtttacggaaaagtaagatgagtgtattggatgaagagtatctaaaaaatacacgaaaagtttataatgatttttgtaatcaagctgataactatagaacatcaaaagattttattgataatattccaatagaatatttagctagatatagagaattatattagctgaacatgatagttgtatcaaaaatgatgaagcggtaaggaattttgttacctcagtattgttgtctgcatttgtatcggcgatggtaccagctatgatatcattagaaatacaaacatataaatttgtaataccgttcataattggtatgatttggacagtagttgtatttcttatgatcaattggaattatataggcaaatactaagaagagacaaaaatatataaatatttctgtacttataggatatttaaaatcaaaataaagttaatttacttatttgcagaggttgcaacccagcctctgtttttcgataaaaagggacggaatctcatttgtttgggttttgtctcatcaatagaaaggaacaaagagtgttcgtaactgaacacgggtttcagaatttcttactaaatataaaagaaaggaattgaacccgacctaaatggtggttcgattcagaacatcaatagaaaggaataagggtgttcgtaactgaacacgggctatggactgtgccaaaaagatagttttttctaggacgtaagcgtccgtcgtcaaaactcctagatggctgtgtccgtttgacgccctttgtatcttgaattatgaacaatactgaattttatgatcgtctgggggtatccaaaaacgcttcggcagacgaaatcaaaaaggcttatcgtaagctttccaaaaaatatcacccagatatcaacaaggagcctggtgctgaggacaagtacaaggaagttcaagaagcctatgagactttgagtgacgaccaaaaacgtgctgcctatgaccagtatggtgctgcaggcgccaatggtggttttggtggagctggtggtttcggcggtttcaatggggcaggtggcttcggtggttttgaggatattttctcaagtttcttcggcggaggcggttcttcgcgcaatccaaacgctcctcgccaaggagatgatctccagtatcgtgtcaatttgacctttgaagaagctatcttcggaactgagaaggaagttaagtatcatcgtgaagctggctgtcgtacatgtaatggatctggtgctaagccagggacaagtccagtcacttgtggacgctgtcatggcgctggtgtcattaacgtcgatacgcagactcctcttggtatgatgcgtcgccaagtaacctgtgatgtctgtcacggtcgaggaaaagaaatcaaatatccatgtacaacctgtcatggaacaggtcatgagaaacaagctcatagcgtacatgtgaaaatccctgctggtgtggaaacaggtcaacaaattcgcctcgctggtcaaggtgaagcaggctttaacggtggaccttatggtgacttgtatgtagtagtttctgtggaagctagcgacaagtttgaacgtgaaggaacgactatcttctacaatctcaacctcaactttgtccaagcggctcttggtgatacagtagatattccaactgttcacggtgatgttgaattggttattccagagggaactcagactggtaagaagttccgcctacgtagtaagggggcaccgagccttcgtggcggtgcagttggtgaccaatacgttactgttaatgtcgtaacaccgacaggcttgaacgaccgccaaaaagtagccttgaaagaattcgcggctgctggtgacttgaaagtaaatccaaagaaaaaaggcttctttgaccatattaaagatgcctttgatggagaataatactcttcgaaaatctcttcaaaccacgtcagcgttgccttgccgtatatatgtgactgacttcgtcagtcgtatctacaacctcaaaacagtgttttgagcagcccgtggctagtttcctagtttgctttttactttatagattttttaagactttcctaagtaatgacggacggtagtgacctccttcgaagttccatacctaaactttgaacctaagttttaaagtttccggacagctgaaaccaagctgtttcaggtgttttcattacggcagaaagtcttcgatttagttgtgaaatggtgaatgatactcttcaaaaatttcttcaaaccacgtcagcgtcggcttgtcatgggtatggttactgacttcgtcagttctatccacaacctcaaaacagtgtttgagctgacttcgtcagttctatccacaaccttaaaacggtgttttgagcagtctgtgcctagctttctagtttgctttttgatttttattgagtatgaattacctaaattatgatgcatagttgatgggatatatataatagattgaaatagaatatgaacaaattgataagaggattttaaagtaatctctaacaatgctttagaaactatggtgtgctattctaaattcaattcactataacttgtttacgttttaaaaaagagccgtcgggctctttttacttatcttcagttccctgcatttcttttatcacagctagtctagtctggatatccttttccaagaccttaaacttgtaagtcaagtcttcttggtattccttgataagttctttttgctggttaatgatttgcaggctgttttggataatatccacatcgtccttgatagcttgaacgcggtcagtggtattcaagacttcatctgtgatggtttggcgattttttgtaaccagataacttccggctgcagctcctgcaaatagcagtaggttggataatttcatagcaactccttaagcgtttttgatggtttcagcgacttgagcaagtttgtcaaagtctggttcgtgggcgataaaatcaatcttgaggtcatcgtcagcactgtagcgaggcacaaggtgaacgtgagtatgaaaaactgtttgaccagcgacttcttcacagttggaaatgatattcataccagcagccttagtgactttcatgactttttgagctacttttggtacttgggcaaagagttggctggcgctcgtagcatccatctccaaaagattgcgatagtgttcttttggcacgaccaaggtgtgtcctagtgttacttgagagatatcaagaaaggcaaggacctgctcatcttcatatacttttgaagcaggaatttcccctgcgatgattttacaaaaaatgcaatctgacataaaatctacctctactgtactgaattttgatataatatagctacattataccagatttggagaaaatatgttagaaattaaaaacctgacaggtggctatgttcatgttcctgttttgaaagatgtgtcctttactgttgaaagtgggcagttggtcggtttgattggtctcaatggtgctgggaaatcaacgacgatcaatgagattatcggtctgttggcaccttatagtggctccatcaatatcaatggcctgactctgcaaggagatgcgactagctaccgcaagcagattggctacattcctgagacgcctagtctgtatgaggaattgaccctcagagagcatatcgaaacggttgctatggcttacggtattgagcaaaaagtggctttcgaacgagtagagcccttgttaaaaatgttccgtttggaacagaaattagactggttccctgttcatttttcaaaagggatgaagcagaaggtcatgattatctgtgcttttgtggtggatccaagtcttttcatcgtggatgagcctttccttggtcttgatccgctggctatttctgatttgattcagcttttggaagtggagaagcaaaagggcaagtctattctcatgagtacccacgtgctggattcggcggagaagatgtgtgatgcctttgtcattcttcacaagggagaggtgcgttccaaaggcaatctcctgcaactacgtgaagcctttgatatgcctgaggctagtttgaatgatatttacttggctctgaccaaagaggaggatctatgaaagacttgtttttaaagagaaagcaggcctttcgtaaggagtgtcttggttatctgcgctatgtgctcaatgaccactttgtcttgttcctgcttgtcctgttgggctttctagcctaccagtacagtcaactcttacaacattttcctgaaaatcattggcctatccttttgtttgtaggaattacgtctgttttacttttactttggggaggaactgccacctatatggaggctccagacaagctctttctcttagttggagaagaggaaattaagctccatctcaagcgtcaaactggcatttccctagtcttttggctctttgtacagacccttttcttgctgttatttgcgcctttatttttagcaatgggttatggcttgccagtttttctgctctatgtgcttttattgggggtaggaaaatatttccacttttgtcaaaaggccagcaaatttttcactgaaactggactggactgggactatgttatttctcaagaaagcaagcgtaagcaagtcttgcttcgtttctttgccctctttacgcaggtcaagggaatttcaaacagcgttaagcgtcgtgcctatctggactttattttaaaggctgttcagaaggtgcctgggaagatttggcaaaatctctatctgcgttcttatctgcgaaatggcgacctctttgctctcagtcttcgtcttctcttgctttccttgctggcgcaggtttttatcgagcaagcttggattgcgacagcagtggtagttctctttaactacctcttgctcttccagttgctggccctctatcatgcctttgactaccagtatttgacccaactctttccgctggacaaggggcaaaaggaaaaaggcttacaggaggtagttcgaggattgaccagttttgttttacttgtggaattagttgttgggttgattaccttccaagaaaaactagcccttctagccttactaggagctggtttggttttactagtcttgtatttgccttatcaggtaaaacgtcagatgcaggactaacattgctgatacgacactaaaaaagaagttgagttcagtctgtctcaacttcttttttgttactacaggataatggttggtccgtagagacttatactcttcgaaaatctcttcaaaccacgtcagcgtcgtcttaccgtactcaagtacagcttgcggctagcttcctagtttgctctttgattttcattgagtattaacttggtcttgacttggtcaaagtggaagcggtcataggcccgccaagcggcgcgagttggagcatctggatcaagagcgctgagtcccatgagaagactggaagtctggtaaaatttttctagttcaatcaagaatcgattatccactgtttcagccttggctagaaaaccaagaatagagtttaattgctcctgaaagcggacgtcgtcagcgcttgcctgtttgcatgcttggtaggctttgtttaagtcagtaatcaaagtatgagctcttttgatggggtctgtatctgtcatgggaatgcctcctttaatctgggtgccagtcttacttctggcaactgtgttttgatactgttagtttatcacttttaattctttttttttattcaaatctttaattgtcattgaaatgtcttgaattgcgctgagtgaattttatgataaaatagttgtaagctcatcatgatgttgtagaaaataatccttttaggagttttcaaagactgtttaggattgggtgtgcttgggctagaccttttctgttattcttttcttaggaggagaatccaatgaaatatatgattattcagacgcagaaaacagtctataaagtaaacatcgacgatatctactatatccaaacacatccaactaaagcccataccgtacagattgttacagaagaagctagttttaatatgcttcaaaatttaagtaatcttgagaaccaatgtggggaaaccttgatgagatgtcatcgaaattgtttggttaatcttgataaattaaaatcgattgattttcaagaaagaatcctttttctcggagaagaaggtcaatacgctgtcaagtatgccagacgtcgctatagagaaattcgtcaaaaatggttgaaagagggagagtaagaagatgagaatatttgttttagaggatgatttttcccaacagactagaattgaaacgacgattgagaaacttttgaaagcacatcatatcattcctagctcttttgaggtatttggcaagccggaccaactgctggctgaagtgcatgagaagggggcccatcagctattctttttggatattgagattcgaaatgaagagatgaagggactggaagtggctagaaagattcgggatcgggatccttatgccctgattgtctttgtgacgactcactcggagtttatgcccctgtcttttcgctaccaagtgtctgctttggactacattgataaggccttgtcagcagaggagtttgaatctcggatcgagacagccctcctctatgccaatagtcaagatagtaaaagtctggcggaagattgcttttactttaaatcaaaatttgcccaatttcagtatccttttaaagaggtttactatctcgaaacgtcgcccagagcccatcgtgttattctctataccaagacagacaggctggaatttacagcgagtttagaggaggttttcaagcaggagccccgtctcttgcagtgccaccgctcttttctcatcaatcctgcaaatgtggtgcatttggataagaaagaaaaactgcttttctttcccaatggtggaagttgtctaatcgcccgttataaggtcagggaagtgtctgaggccatcaataaattacactgagctaggagaatttatgaacattgcttggatattgttgtatacacttgttactaatggactagaaattgtcatcttctttaaggtggatggaattgatcttactttcgagaggatttttaaggcctttcttttgaagatactgttggcctttgtttttgtgatgattagctatatagtaggaaatgtttacctatcttattttatggaacccttgtacggcataggcttatctttcttattattgagagggcttcctaaaaaactccttttcttttatggtctctttccaatgatattggtgaatctcttttatagaggagtctcctattttgtgcttccatttttgggacaagggcaagtatatgatggctactcatttactgggttatgtataataattttcaatttcttcatttctctagcttttttgaaatggttggactacgattttactagcttgagaaaggagattctcgataaagcctttcaaaagtccctgactcagattaactggataatgggtggctactatctagtcatggaaagtctgtctttttttgaatatgaacaaagtattcaatcaaagactgttcgccatctcatcctagtcttttacctactcttttttatgggggttatcaagaaattggatacctatttgaaggaaaaactctatgagagattggaacaagagcaggccctgcgctatagagatatggaacgctatagtcggcatatagaggagctttacaaggaagtacggagctttcgtcatgattataccaacctcttgactagcttacgtctgggcattgaagaggaggatatggagcagataaaagaggtctatggctccgtcttaaaggattccagtcagaaattgcagaacaataaatatgacctgggcagattggtaaatattcgtgataaagccctcaaaagtcttctagcagggaaatttttaaaagccagagataagaacattgtctttaatgtcgaagttcctgaggagattcaggtcgaggggatgagtctacttgattttctaaccattgtgtctatcctttgtgacaatgctattgaagccagtgtggaagctagtcaacctcatgtttcaatcgcctttttaaaaaatggagcacaggagacctttatcatcgaaaactccatcaaagaagagggcatcgatatttctgaaatcttctcctttggagccagttctaaaggggaggagagaggagttggtctctataccgtcatgaagattgtggaaagccatcctaataccagtctaaataccacctgtcaaaatcaagtctttcgtcaggtacttactgtgatacatacagaatgatgaaaaataagaccgagagtacttgtttctcggtcttatttttttatagttgtattggatgatgaagttcttatgtgatgtaatgagcatatctattaatgttatataataaatcttcccacaatcctccacctgtaatttgattgagttcggtagttgttagttcttgaaatgaagttaggttttgtttcttatccatgttatgattctcctttttgataagataataaatagttatagagtgttatctgaaaattaatcagaatgtgttaaaattttatctttgaaataatcaaaatatgttttctttgtagttacactagtgacgcgaccttgtaagccatattggatgagtttactatcctcgttagatagttttgcaagagcggttaatttaaagagatttccttgctctgttctggtaggagtttgatcaattgtctgaagttggccgatgatggtggtgccgtgatttccaatcttctccagttttaatcttacagtttgtcctttatctagtagaggtagatagtcagaagatacgtagtaagtgattagtacttctcttgtatctgtgatgacagggaatatttgagcaatttctgtaccagttggaattctatttttaccttcaaattcgctgttcagatgaacgatacctttacttggggaggttaaggtattgttttccaaacgctgtgtggcttgatctagttgtacttttaattctgttaattgattctccacagttagttgttgctgtgaggctgtctgtaaaaactgagtgcggagtacttcaattttggttgctaaactgttatcataagttgctacacttccgataccagcttgctgaattttgaggcttgcgatagatgattcaagacctgcaatactttgattaatttgagataaaaatggctcctctgcagttccttgtgtttgtccttgtgaggctacaagataacgattcaaaattgactggtgcggattgccagttggtaagcgtgctctgttatttatgatagcatctctcaactcttgatattctccaatttgttgttgaacttttgtaatttcttgttcaatagctgatgaactgctattggaaagattagcttgatttgaaacttcggtgttagtctttgtgatacccagttcaatatcatgggattgtttagtaaaattcataaaggtattatggtagccaaattcatcctcgccagaaaaaagatcagtcgctttttctaagctttgtttcaaaattccaagtccttctttttgcttctcaagtctttgtaattgagttgctaaggcagttttctgactttcttccattgtttcagagtatttgatgagtaagtcccctttttcaactacttgatttgccactaaatgattagctaggataggattatcactggttgactgaatggaggcaatgacacttgtaggggcgatttctccttgggaagtaacagtaatttcttttgtggcaacaagggagaaaatcaagatgaaagtaaatagtaatgaaagaggtataattaacactgtcgcatagttatggtaacgtctctgataaaactcgacgcttctaaaaagattaggattcatgacattctccttatttattgaatagatgatggtagaaaccttgcgcctgcattaactcttggtgactaccaacttcaatgattttcccctggtcaagaacaatgacacggttggttcgttcggctatactgagacgatgggctacaaagagaatggttttatcagttagagacataagattatctataacctttttctcagtcaagacatcaagaccgctagtagcttcatctagtattaaaacaggagatttagttaaaagagcacgagcgagagcgattcgttgcttctgtcctcctgatagaccagctccatcagagagctgagtttgatagcccataggcattctttcaatgtcttgacggatttcagctacttcacaagcttttagaatatcttcttgactaatcatatgattaccgcccaaggttaagttttccaaaatagagccattaaagatataggcttgttggggtaggtaattaatatgacggcgcaagacttttttatcaatgtttttaatatcctgatgattgatggaaatatgccctttgtagggttcaaagaaattgacaatcattttggctaaagttgttttaccagaaccactaactccaactaggctaaccttatctccttgtttaatcgtgagattaatatctgttaaggtatctcatccaaaaccatacttataagaaaggtcatcaaattcaatatcgcccatcaaaaaatgtgaatgaacagggttttcttgaacttgaaattcagattcgactagatagacttcgttcaaacggttattagcgaccttcgcagattggagtttggtttggaggttgataatattttccataggagttgtaaagtaagaaaaaagtgtgttaaaggtaatcagctgaccgatagaaattttacttgacatgactaattgagcgccaaaccataggataaggatattcagaactaattttgttccctgctttaaactcgtttgtaaaatagaatatttactgagcttaaaggatttttccaaataatctacaaattcgctgtctatattttgatagcgattttcttcactcgtgagcgactttatagtttcaatcccgttgatatcttcgataatggcagagctaaccatagaattactttgcatgacatcatggttcattttttcgaaaggtttcataaaagaaaagatgatgaacatgtatataggaatggaaataagagaaagaaggaagagattagggttttgtgccagtaagacgcctcctacaagaatcagaatagaaacatccagaaaaagagaaagaatggtagaagccaaggcatctataatagagttagcatctgtgaatcgtgaaatgatttctcctgtacgacgtgtcgcaaagaaagacatgggaagttcaaaaatatggcgaatataggataaaatcacatcaatacttaatctctgactcagaacggttaggagataatctctggagaagctcatgacttgttggaggatataggtgataaccagaccaactgagatgattcctaaagttgatttcatctgatttggaatgtattcatccaagattccttggagatagtaagaaccacctatattgataatagtgaccaataagcttgagagaacaatgtaagcaatgagagatttttgtttgaaaatcagaggaaggaagcttgcttagtagaccattctttttatctttatggggttgatagctgggtttggtagctagaaaaatagctactccagtccattcatagaaaaagcgttcttttgacattttagtgatttttacagaagggtcaggatcaccaataatcagatagtctttctttgtttgatagacaacatagtaatgttggagttttccttctttgttaacgtgaacgataaatggataggggacatcactcatgtcaaagagcgttttatctgcttgaacaggtcttgtttcaaagcccatttcatcagcggcttttacaatgccaagagcagtcgtcccttctttattggtctttgcaagttctctcaagtgagctagagaaaaatctgaaccatagaatttagcaatcgaggctaaggcagcgacaccacagtctctcgcatctatttgaggaacaaatgtacgtttataagaagtcattggcaattcctttcatatagtggataggtctattatgtcataaaactaagttcatattttatgaaatcttgaatagtcattaaaacttcctgaatggtaaaaaagtgattagaaattattttttttaaacatttagaggtggcttgaaataaaaaagctaattcaagacgtttcgatgacaattcaagatctggatgaaaaattttaaaaaacgatgatatactaaacttatcaaagttacaacaagacaaaaataaaaaaagaaaaaaggagtatttgtcatgaatacaaaaatgatggaacaattttctgttatggataatgaagaactcgaaatagttagtggaggaagaggcaatttaggatctgcaatcggtggttgtattggagcagtactattagctgctgcgactggtccgataactgggggagcagcaacacttatttgtgtaggttcaggaattatgtcctctttgtaagattatgattcttaaatatagtattattatcgctattaatttactgtcttatttacttacttacaaaatatcaaagttatctaagaatgatgagaataagatagttagcaaaattttaattatattatcaatcgtttatgtaatcgttgatgctttacttagttgatggattggtaggaataaaaaacttaactataaactattatttactaatattttttgctttctgcaagttaataaatagtatagtaaaactttttattgcaaggagaataacgaaattaagatattttagatactcaagattattgaaatcttagactaaaaaataggtactgctacctttaagaagatagtagacgtatatacttttttaagaaaatcaaaaagatactataaaaaatctatttgtttattgaatttaagactttggtaacaaattgaaaataaaaaggaggtattcatcatgaatacaaaaatgttgtcacagttagaggttatggatactgaaatgcttgcgaaagttgaaggggggtatagctccactgattgtcaaaatgcactgattacaggagtcactacgggaattataactggtggaactggagcaggtttggccactttaggagtagctggacttgctggtgcatttgttggagcacacattggtgcaattgggggtggattaacatgcttaggaggtatggttggtgataaattgggactaagttggtaagacttatagtaaaattatgaggattctattctgatttattttagttttttaaaaaaggagtatttgtcatggatacaaaaatgatgtcacaattttctgttatggatactgaaatgcttgcttgcgttgaaggtggcggatgcaattggggagattttgccaaagcaggtgttggaggaggagcagcaagaggtcttcaactaggcattaaaacaggaacatggcaaggtgcagcaactggtgctgcgggtggagctatacttggaggtgtagcctatgcagcaacatgttggtggtaattatggattttaaaagttttattattggtttagtagttggtatatttggtccttatatggatgacttaattagaaaaatattttcaaaatcttccaaaaaggatacggatagtactctctaaaaaataaatttctcccctgtatttgctagcttaatttacaggggagtttctttaatattgtttcgcctgtcaaaatgatatgtgatagcaggatgaaaagtctacaaacaagttggtatcaatacaatataaagaggaaagtatgtttttcatgcttgcttttttaatttttacaattcaagaggttttgatgaccatttatgatttgagtgatccaaggtcaaaataagtgctatactagcagtgtaaatgttcttgctcaactaagataaatcgcacatttaggaggaaatcttatgaagaaaaaaatactgattattttcgttctgtatctaatcatgtccatctttctatatccgcttagggagagtgcttggtatcagctattttataccatagcctatgtgattgcagttatgatctattttgctatcaataaaaagaaaggagaaaagaaatgaaaacttttcttgctaaaaaacggaacatcttccttgcgagattgttcttaggtcagttgcccttgcttgtttctacttatctatttctatctcgtcagtttttaaatttttccgtagttttccaatttcttttagtagttattaacttggcttctattttggttactgtttatctcactagggaaatgaggataagagagtttgaagatgatgatttggttagtcctagaaccaatcaacttatgttcatcggcttgacaggttttatgtctattatttgtttgtatagaggtatcacagcaggagaatcctaccaacaaataatcgcttatattggcgctgttctctgcttaatcatcatgcttctgctcatgtggggcttgaagtattataaaaagtagagcttaatgaagtataaaagaaaagggtaagtgtttttgcaatacttacccttttataatagattccctgcgaaacaaaatatggtatagtatagtagattgaaactagaatagtacgcctctacttctaaaacattgttagaaatcgatttgactgtcctgatcgatttatcctgttcttatttcattttactatagttctatgaattatgaagcaagtaaacaactaactgatgcacgatttaagcgtcttgttggtgttcagcgcacgacttttgaagagatgctagctgtattaaaaacagcttatcaacttaaacacgcaaaaggtggacgaaaacctaaattaagcctagaagaccttcttatggccactcttcaatatgtgcgagaataccgcacttatgaagaaattgcggctgattttggtgttcacgaaagcaacttactccgtcggagccaatgggttgaagtaactcttgttcaaagtggtgttacgatttcaagaactcctctcagttctgaggacacggtaatgattgatgcgacggaagtaaaaatcaatcgccctaaaaaaagaattagcgaatgattctggtaaaaagaaatttcacgctatgaagactcaagcgattgtcacaagtcaagggagaattgtttctttggatatcactgtgaactattgtcatgatatgaagttgttcaaaatgagtcgcagaaatatcggacaagctggtaaaatcttggctgacagtggttatcaagggctcatgaagatatatcctcaagcacaaacttcacgtaaatccagcaaactcaaaccgctaacagttgaagataaagcctgtaaccatgcgctatctaaggagagaagcaaggttgagaacatctttgccaaagtaaaaacgtttaaaatgttttcaacaacctatcgaagtcatcgtaaacgcttcggattacgaatgaatttgagtgctggtattatcaatcatgaactaggattctagttttgcaggaagtctaatgtaatttttgcaattcaagacgtttcgatgactattcaaaatctggatgaaaaattttaaaaaacgatgatatactaaacttgtcaaagttacaacaagacaaaaattaaaaataaaaaagagtatttgtcatggatacaaaaattatggaacaatttcatgaaatggatataactatgttatctagtattgaaggaggcaagaataattggcaaactaatgtcttagaaggtggtggtgctgcttttggtggctgggggctagggacagctatttgtgctgcgagtggtgttggagcaccatttatgggagcatgtggatacataggagctaaatttggtgtggatctttgggcaggagtaacaggggcaacgggtggattttaataaaaggagacttgtatgaatacttattgtaatataaatgaaacaatgctgagtgaggtttatggaggtaattccggaggagcagctgtagttgctgctttaggttgtgcagcgggtggagtgaaatatgggagacttctaggaccatggggcgctgcaataggaggaattggaggagcagtggtttgtggatatttagcctataccgctacatcataaaaatgaaagctaaattttatgaaggctatattctttattattctcttcgcttttcaaacctatcttatttatctatccataagtatctccgataaaaaacaaaagactattgaattaacatcattgaattgttttgtcatattatttctaatctatgataaattaatttttctctttattgcctatgtttttttgataatttttatattaaacttgttccgtaactgaaaagtgatacactatatggatacaaaaatgatgtcacaatttgcagttatggataatgaaatgcttgcttgcgttgaaggtggagatattgattggggaagaaaaattagttgtgcagcaggggttgcatatggcgcaattgatgggtgtgcaacaacggtttgacatttctattgggaccatttgctataggaataggtgtaactggtgctgcaggtggagctatacttggaggtgtagcctatgcagcaatatgttggtggtaattatggattttaaaagttttattattggtttagtagttggtatatttggtccttatatggatgacttaattagaaaaatattttcaaaatcttccaaaaaggatacggatagtactctctaaaaaataaatttctcccctgtatttgctagcttaatttacaggggagtttctttaatattgtttcgcctgtcaaaatgatatgtgatagcaggatgaaaagtctacaaacaagttggtatcaatacaatataaagaggaaagtatgtttttaatgcttactttttaaattttttaacaattcaagatgtttcgatgacaattcaagatttggatgaaaaattttaaaaaacaatgatatactaaacttgtcaaagttgcaacgggtgctgctacattatgttaaaaatcgctcttgattgataagctggatttgttaggaaaggagtaaataattatggataagaaaaagatagtttcgactataatatgtatagtatttcttgtagtgtcagtagataatttttttagagacttaaccccgttactgttcattttaaatattattggcctgtcttgcttttcagtgctaacatacattaaaataaaagagatactcttaaatataagtaaatgatgatttggttagtcctagaaccaatcaacttatgtttatcggcttggcagattttatgtttgtcatttgtttgtatagaggtatttcagaaacagaattctatcaacaactaatcgcttatataggtgtattctctgcttgtttatcacgcttctgctcatgtggggcttgaagtattataaaaagtagctttctatccttttctgacaggatatttgagtagaaggctctattaaattgttagtgaaataaatgaatggaggtatttaatatgaaatacagattattttttgttattttcttgagtagtgtgttggatattcttttagggacatttttacaaatctctatcgtatctattgggtggcttgttctttacagtggtttgtttgaagcaggagttttccttcttgctaataaaggggtggcggtaaaaatcaaggaagtagatattcgaaatcgctttaaatttatttttggaaaaaccttatggtttcaaattcttttgctcatctttttgataatcaaactttatcttggtttggatgcgaggttgattttattctatggacatattttcattgtctttaatgccttaatgtatctattatctagtagtcaggttagccttaaaaaaaacaaactgtcttcttaatcttacagcagtagagcctgacaaggtgaggtcatagtagggaggatttctatgaaaaagtatcaacttctattcaaaataagtgcagtcttctcttacttatttttcgtatttagtctttctcagctgacgcttatcgtccaaaactattggcaattttcttctcagataggcaatttattctggattcaaaatatcttgagtttactttttattggagtcatgattgtggttcttgttaagacaggccatggttatctcttccgcattccaagaaaaaaatggctttggtattcgattttgacagtattagtgctagtgttccagatctcttttaacgttcagacagctaaacatgttcagtcaactgcggaaggttgggctgtattgattggttatagtgggactaactttgcagagctaggtatttatatagccctgttctttctggttccactgatggaagaattgatttatagaggattactgcaacatgctttctttaagcattcgcgatttggtcttgatttgcttcttccttctattttatttgctctccctcatttttcaagcctgcctagtctgttagatatcttcgtctttgcaacagttggaatcatctttgctggtttgacccgctataccaagagcatttatccatcctatgcggtgcatgtgatcaataatattgtagcgaccttcccgtttttgctcacttttctacatagggtcttggggtaaaaaaacaaaaggcttgcttttcagccatagaggaggtcatcatgtataaacacttatttttcctagattccaaaactttagatcggttgacaccctatattctagtcttggcttctgacaccattgcttttaatgtttttgtgctaacctttgtatctgcggtggtttttaatttcctaaattccatgctagctttaatggctatattcataggggctggctatgtggtcggattttggttactaatactcaatgaaaatcaaagagcaaactaggaaactagccgcaggctgtacttgagtacggcaaggcgacgttgacgtggtttgaatttgattttcgaagagtataaaatggtttgttttggaaaggctagaactaaagaatgacgtgtaggaagtctgtttgttgaggaggataattttatggagttttttgataaatttcatgccttgtgttttggatttttagtactaataattgtcattacagttccttatacgattaaccatgggggtttttttcaaaatgaatctgcattgattcttgtaagtcttcttgtaacctcgctgagtgttgcttatgctagaaagtttgaaatgatttcttttgggatgttaagcaagaaacaacttttgcttttcattgcaatctttcttctaagtgtacttgagacgctggtttatattcatttcttcgctgtttcttctggctcaggggtccaacacttggcggaagtcagcagaggaatttccctgtctttgattttgactacctcagtttttggccccatccaggaggaactcattttcagaggacttcttcaaggtgcggtttttgacaattcttggttagggcttgtgctaacttcctctctcttttctttcatgcatggaccttctaatgtcccttcgtttattttttatctacttgggggtttgttgctgggctttgcttataaaaagagtcaaaacctatgggtttctactctagtccatatgctttacaacagttggccactcttatattatttataaaaattatgaaaaggtaagcagaagacggtgcttacctttttcaagctataatgatacccaagccaatccagaggcttttctttgagaatcgggttagagtggttgacgaataggccaaaaactagtagaatagtaaggaaactttatacggaggaaagaaatggatttgggtgataatgagctaacactgactcccatacctgggaaaagtggcaaggcttatatgggtagctatcctgatgggaagcgcatctttgtaaaaatgaacacctctccaatcctacctggtctagctagagaacaaattgctccacaattattatggagtcgtcgtttggcagatgggcgtgatatgtgtgctcaagaatggttgacaggcaagatattgaccccctatgatatgaatcgtaagcaaatcgtcaatattttaacccgtcttcatcgctcacgtccgttgatgacacaattgagtcgtttgggctatgccatggaaacacctgtagatttactacagtcttggcaggaaacggctccagatgctttgcgtaaaaatcattttatcagtgaagtgatggctgatttacgtcagactattccaggatttagagaggaccatgcgaccattgtccatggagatgtacgacatagtaattggattgagacagatagtggcttgatttatttagtagattgggattcggttcgcttgaccgatcgcatgtttgatgtggcccatatgctctgccattatatttcagaacatcagtggaaggaatggttgacctactacggttacaagtacaatcaaacggtattaagtaaattgtattggtatggtcaattgtcttatttgagtcagatttccaagtattatatgaaccaagatttagaaaatgtcaatcgggagattcatggtttgcgtcatttccgagacaagtatggaaagagaagatgagagttagaaatcgtaaaggggcaacagaattactagaggcaaatccccagtatgtggtcctcaatcccttggaagccaaggcaaaatggcgggacttgtttggcaatgataatcccattcatgtggaagttggaagtggaaagggtgcctttgtttcaggtatggccaagcaaaaccctgacatcaactatatcgggattgatattcaaaagtctgttttgagctacgctttggacaaggtgcttgaagttggagtgcctaacatcaagctcttgtgggtagatggttctgacttaactgactactttgaagacggtgagattgatcgcttgtatctgaacttttcagatccatggccgaaaaaacgccatgaaaagcgtcgtttgacctacaagaccttcttggataccttcaaacgtatcttgcctgaaaatggagaaattcatttcaagacggataaccgtggcttgtttgagtacagtttagtgagcttttctcaatatggcatgaaactcaatggtgtctggttagatttgcatgccagtgattttgaaggcaatgtcatgacagaatacgagcaaaaattctcaaacaaggggcaagttatctaccgagttgaggcagaattttaagagataacctaaaattaggctgtacaagtgcttttgctttacataagttggcaaacgtgctatactgatagtaagaatatgaaaagtgaggcggggaaatatcttcgcctcttgcttatgaggaggtggacgcaatcgcaacaatcgtagaattagtcagagaagttgtagaacctgtcatagaagctccttttgaactcgtggatatcgagtatggaaagattggcagtgacatgattctcagtatttttgtagataaacccgaagaattaccttgaacgacacggcagacttgacagaaattatcagtcctgtcctagacaccatcaagccagatcccttcccagaacaatatttcctagaaattaccagtccaggtttggaacgtcctttgaaaaccaaggatgccgtcgctggagcggttggaaaatacatccatgtcgggctctaccaagccatcgataagcaaaaggtctttgaaggaaccttgttggccttcgaagaggacgagttgactatggaatatatggacaagacgcgtaagaaaaccgtccaaattccatacagtttagtatcaaaagcacgtttagcagttaaattatagaaaaagaaaggatagcttttgaggattcaaaagtgaagaaaacatgagtaaagaaatgctagaggccttccgcattttggaagaagacaagggaatcaaaaaagaagatatcatcgacgcagtagtagagtcgcttcgttccgcttatcgcagacgctatggtcagtcagacagcgtagctattgacttcaacgaaaaaacaggtgactttacagtttatactgtccgtgaagttgttgatgaagtatttgatagccgtttggaaatcagcttgaaagatgctcttgccattaattcagcttatgaacttggagacaaaatcaagtttgaagaagcaccagctgagtttggtcgtgtagcagcccaatctgccaaacaaaccatcatggaaaaaatgcgcaagcaaacacgtgccatcacttacaatacttacaaagaacatgagcaagaaatcatgtctggtacagtagaacgctttgacaaccgctttatctatgtcaaccttggtagcatcgaagcccaattgtcaaaacaagaccaaattcctggagaagtttttgcttctcatgatcgtatcgaagtttatgtttacaaggttgaagacaaccctcgtggtgtgaacgtctttgttagccgtagtcatccagaaatgatcaaacgtttaatggagcaagaaattccagaagtttatgatggaactgttgaaatcatgagcgtggctcgtgaagcaggtgaccgtacgaaggttgctgttcgtagccacaatccaaacgtggatgctatcggtacaatcgttggacgtggtggtgctaatatcaagaagattactagcaaattccacccagctcgttacgatgctaaaaatgaccgcatggtaccaatcgaagaaaatatcgatgttatcgagtgggtagcagatccagctgaatttatctacaatgccatcgctcctgctgaggttgaccaagttatctttgatgaaaacgacagcaaacgtgccttggtggttgttccagataacaagctttctcttgccattggtcgtcgtggacaaaacgtgcgcttggcggctcacttgactggttaccgtatcgatatcaagtctgctagcgaatttgaagccatggaagacgctgcttcagtagagttggaagtagaaaacgatactgtagaagaataaaagctgctagaggagggaaagatgaaaacaagaaaaatccctttgcgcaagtctgttgtgtctaacgaagtgattgataagcgtgatttgctccgcattgtcaagaacaaggaaggacaagtctttattgatcctacgggcaaggccaatggccgcggcgcttatatcaaactagacaatgcagaagccctagaggcgaaaaagaagaaggtctttaaccgcagctttagcatggaagtggaagaaagcttttatgacgagttgatcgcttatgtggatcacaaagtgaaaagaagagagttgggacttgaataagcaaaagataagtaatctcttggggcttgctcagcgagcagggcgcatcatatcgggtgaagaattggtggtcaaggccattcaagacggcaaggccaagttggtctttctagctcatgatgctggacccaatctgaccaagaagattcaagataaaagtcattattatcaagtagaaattgtaaccgtgttttcaacactggaattaagcatagcagtcgggaaatcgagaaaggttttggctgtaacagatgctggatttacaaagaaaatgaggtctcttatggaatagaagaggaggacatgatttgtctaagaaaagattgtacgaaatcgcaaaagaacttggaaaagaaagtaaagaagttgtagcgcgtgcaaaagagttgggcttggatgtgaaaagccactcatcaagtgtggaagaagctgtcgctgcaaaaattgctgccagctttaagcctgcagctgctccgaaagtagaagcaaaacctgcagccccaaaagtaagtgcagaaaagaaagccgaaaaatctgagccagctaaaccagctgtagctaaggaagaggcaaaacctgcagccccaaaagcaagtgcagaaaagaaagccgaaaagtctgaaccagtaaaaccagctgtagccaaggaagaggcaaaaccagctgagccagtcactccgaaaacagaaaaagtagcggctaaaccgcaaagtcgtaatttcaaggctgagcgtgaagcacgtgctaaagagcaggcagagcgacgcaagcaaaataagggcaataaccgtgaccaacaacaaaacggaaaccgtcagaaaaacgacggccgtaatggtggaaaacaaggtcaaagcaaccgcgacaatcgtcgctttaatgaccaagctaagaagcagcaaggtcagcaaaaacgtagaaatgagcgccgtcagcaagaggataaacgttcaaatcaagcggctccacgtattgactttaaagcccgtgcagcagccctaaaagcagagcaaaatgcagagtacgctcgttcaagtgaggaacgcttcaagcagtatcaggctgctaaagaagccttggctcaagctaacaaacgcaaggaaccagaggaaatctttgaagaagcggctaagttagctgaacaagcacagcaagttcaagcagtggttgaagtcgtccctgagaaaaaagaacctgcagtggatacacgtcgtaaaaaacaagctcgaccagacaaaaatcgtgacgattatgatcatgaagaagatggtcctagaaaacaacaaaagaatcgaagtagtcaaaatcaagtgagaaatcaaaagaatagtaactggaataacaacaaaaagaacaaaaaaggcaataacaagaacaaccgtaatcagactccaaaacctgttacggagcgtaaattccatgaattgccaacagaatttgaatatacagatggtatgaccgttgcggaaatcgcaaaacgtatcaaacgtgaaccagctgaaattgttaagaaacttttcatgatgggtgtcatggccacacaaaaccaatccttggatggggaaacaattgaactcctcatggtggattacggtatcgaagccaaacaaaaggttgaagtggataatgctgacatcgaacgtttctttgtcgaagatggttatctcaatgaagatgaattggttgagcgtccaccagttgttactatcatgggacacgttgaccacggtaaaacaacccttttggatactcttcgtaactcacgtgttgcgacaggtgaagcaggtggtattactcagcatatcggtgcctaccaaatcgtggaaaatggtaagaagattaccttccttgatacaccaggacacgcggcctttacatcaatgcgtgcgcgtggtgcttctgttaccgatattacgatcttggtcgtagcggcagatgacggggttatgcctcagactattgaagccatcaaccactcaaaagcagctaacgttccaatcatcgtagctattaacaagattgataaaccaggtgctaacccagaacgcgttatcggtgaattggcagagcatggtgtgatgtcaactgcttggggtggagattctgaatttgttgaaatttcggctaaattcaaccaaaatatcgaagaattgttggaaacagtccttcttgtggctgaaatccaagaactcaaagcagacccaacagttcgtgcgatcggtacggttatcgaagcgcgcttggataaaggaaaaggtgcggtcgcaacccttcttgtacaacaaggtaccttgaatgttcaagacccaatcgttgtcggaaataccttcggtcgtgtccgtgctatgaccaacgaccttggtcgtcgtgttaaagttgctggaccatcaacaccagtctctatcacaggtttgaacgaagcaccgatggcgggtgaccactttgccgtttacgaggatgaaaaatctgcgcgtgcagcaggtgaagagcgtgccaaacgtgccctcatgaaacaacgtcaagctacccaacgtgttagccttgaaaacctctttgatacccttaaagctggggaactcaaatctgttaatgttatcatcaaggctgatgtacaaggttctgttgaagccctttctgcctcacttcaaaagattgacgtggaaggtgtcaaagtgactatcgtccactcagcggtcggtgctatcaacgaatcagacgtgacccttgccgaagcttcaaatgcctttatcgttggtttcaacgtacgccctacaccacaagctcgtcaacaagcagaagctgacgatgtggaaatccgtcttcacagcattatctacaaggttatcgaagagatggaagaagctatgaaagggatgcttgatccagaatttgaagaaaaagttattggtgaagcggttatccgtgaaaccttcaaggtgtctaaagtgggaactatcggtggatttatggttatcaacggtaaggttgcccgtgactctaaagtccgtgttatccgtgatggtgtcgttatctatgatggtgaactcgcaagcttgaaacactataaagacgacgtgaaagaagtgacaaacggtcgtgaaggtggattgatgatcgacggctacaatgatattaagatggatgatgtgattgaggcgtatgtcatggaagaaatcaagagataagattttttgctcctttcttaggtggtgagggacgcaagcaaaccgatggtttcattgcttatttttgagcctagggtctcaaaaatcccctgtgatgggactgataaatcagttccatcactttcaccacggcgaaagaagcagatgacttcaaattgaacttcgtttcaatttaaactgaaaatcaagaagtttaaaatagctaggtctgctggcctagcttttggttcaaagtagagaaaggaatatcatggcaaatcatttccgtacagatcgtgtgggcatggaaatcaagcgtgaagtcaatgagattttgcaaaagaaagtccgtgatccacgtgtccaaggtgtgaccatcatagatgttcagatgctgggtgacttgtctgttgccaaggtttattacaccattttgagtaaccttgcttcggataaccaaaaagcccaaatcgggcttgaaaaagcaactggtaccatcaaacgtgaacttggtcgcaatttgaaattgtacaaaatcccagatttgaccttcgtcaaagacgagtccatcgagtatggaaacaagattgacgagatgctacgcaatctggataagaactaaagaagaggggttgcccctcttttttggtggaggaaaataggttgaatttgaaatggaaaaatattcttttataatagattgaaactagaatagtacgcctctacttctaaaatattgttagaaatcgatttgactgtcctgatcgatttgtcctgttcttgtttcattttaatataaaaaagggattctgtattttttaatgttatctaattagaaaatgctttttttgtaggaaatataatatgataaggtgcaaaaaagaaataaggagtttgtatatggctgaacaagacttagctatgcaagtattgcaacaagtggtgaaactacctgttgttaaggttgatcgttcgaaatttttagtggataagttttccaaagaattggatccaaaagatattcctaccttattggaacaaggtccaacgactcttctatctcaagaaatattagatcgtgtagctaatgcttgtattcgggacaatgtattattagcgagtgggacttctgttttggcaggattacctggagggcttgctatggcaattaccattccagctgatgtggctcaattttatgctttctctctgaaattggctcaagaattaggttatatttatggttatgaggatctttgggcttcacgagaggagttgagtgaagatgctcaaaataccctcttgctttatctaggcgtaatgttaggggtgaatggaaccgctgctttgctacgtgttggtagtataacaattgccaaacaggtaatgaaaatagtgcctaataaagctttaacaaagacgctttggtaccctattttgaaaaaagtcttaaaaatatttggtgtgaatcttaccaagggagggttggccaaaggaatggggaaatttattcctatcttgggtggtatcatttcaggtggtttaacctttgcaactatgaaaccaatgggggaaagcttgcagaaagaattatccaagctagtcaactatagtgaagttcaatatcaagaagatgttgaaacaatccgaaaagaggctgaaatcatcaaaggagagtaatatgaatcctatcaaagcttttgctaaaatttatggtaattactttttgaccgtgcaaggtgtaaaagtgatgaaaacgataaagaaagctgaccatgtcgttgttggtctggggaaactttttattgccgacaagttaatggatacggctcggtggctcattaagccagaggagagagaatgaaatttttttggtcttcttgctattctttttatcaaaccgattattgggattgtgaaattcttttggatgatcatctcttttgcagtccaattgctgttttacaagatagtgtttaagatattggattggctctttaaacttatctagatggtaatccaagttgcagagaactagcaggaactccactgctagttttttattctctttccatatggtataatataagcagtaaaatcattttatactcttcgaaaatctcttcaaaccacgtcagcttcaccttgcagtatatatgttactgacttcgtcagttctatccacaacctcaaaacggtgttttgagctgacttcgtcagttctatctacaacctcaaaacactgttttgagcaacctgcggctagcttcctagtttgctctttgattttcattgagtattagaacatacaatggaggtcgtcatggacaatatcatcgatgtgtcaattcctgttgcagaagtggtggacaagcatccagaagtcttggaaattctagtggagttgggttttaaaccccttgccaatcccttaatgcgcaatacagttggtcgtaaagtatcacttaaacagggttctaagctagcaggaactcctatggacaagattgtacgcacactggaagcgaatggctacgaagtgattggattagactaatgacagatgaacggattcatatcctacgggatattttgttagaattgcacaatggcgcctctcctgagtcggttcaagatcgctttgatgcgacctttacgggcgtgtcagccatcgagatttcccttatggagcacgagctgatgaactcggattcgggcgtcacttttgaagatgttatggaactctgtgatgtccatgccaatctttttaaaaatgctatcaaaggtgtcgaagtttcagatactgagcatccaggtcacccagttcgtgtcttcaaagaagaaaatctggctctccgtgcggccttgattcgcattcgtagattgttagatacctatgagtctatggaagacgaggaaatgctggcggagatgcgtaagggtttggtgcgtcagatgggacttgtgggtcaatttgacatccattaccaacgtaaggaagaactcttctttcctatcatggagcgctatggacacgattcacctcccaaagttatgtggggagtggatgatcagattagggaactctttcaaacagctctaacgacagccaagtcactaccagaagtgtcaattagcagtgtaaaggaagcttttgaagcttttgcgacagagtttgaaagtatgattttcaaggaagagtccatcctcctcatgattctccttgagtcttttactcaggatgactggcttcagattgcggaggagagcgatgcctatggctatgccatcatccgtccgtcagagaaatgggtgccagaacgacagagctttattgaggaaaagattgcagaggagcctgtacagctagatacggcagaaggtcaagttcaacaagtcatagatacgccagaaggccattttaccattacctttacccctaaggaaaaggaagctgtgctggaccgccatagtcaacaggcttttggtaatggctatctttcagtcgagcaggccaatctcatcctcaatcatctccctatggagattacctttgtcaataaagaagatattttccagtattacaatgacaatacgccagctgatgagatgattttcaaacggacgccgtcccaagtcgggcgcaatgtcgaactctgccatccgcctaagtacttggacaaggtcaaaactatcatgaaggggcttcgtgagggaagcaaagacaagtatgaaatgtggttcaagtctgagtcgcgaggtaagtttgtccacatcacctatgctgcagtacacgatgaagacggagaattccaaggagtgttggagtatgttcaggatatccagccctaccgtgagattgatacggactattttcgtggattagaataaggagaaaaaatgagttacgaacaagaatttatgaaggaatttgaagcttgggtcaatacccaaatcatgattaacgacatggcgcacaaggaaagccaaaaagtttacgaagaagaccaggacgagcgtgccaaagatgccatgattcgctacgagagtcgcttggatgcttatcagttcttgcttggtaagtttgaaaacttcaaagtaggcaagggattccatgatttgccagaaggcttgtttggtgagcgaaattattaaacgagaaagattcttgatttttcactaaaatcttgatagaatgtttatgttaaatccttgtcagagcagggattttttattgaaaggattttatcatgtcaaagaaactcaatcgtaaaaaacaattacgaaatggcctccgtcgcgcaggtgccttttcaagtacggtgactaaggttgtagatgagacaaaaaaagtcgtgaagcgtgcagaacagtcagcaagcgcagctggtaaggctgtttctaaaaaagttgaacaagcagtagaagctaccaaagagcaagctcaaaaagtagctaattctgtagaagattttgcagcaaatttgggtggacttccacttgatcgtgccaagactttctatgatgaaggaatcaagtctgcttcagatttcaaaaactggactgaaaaagaactccttgccttgaaaggaatcggcccagctaccatcaagaaattgaaagaaaatggcatcaagttcaagtaatttttcttgagccttgcatttccgaaaaaatcttgctacaatagagccattagaggtgttttgaatcccacattttacagaaagtggcggcgctgagaagtccacaaatgtgtcaaaactggttgctaatggatgaaaaattgaaataaaagtgtctttttgctttaaagacgagagttgcgggcaactgcccgaaattgggtggtaccgcggataaacacattcgtccctgtcatgtagatggcagggcttttcttttacgtcttagtcaaagggggttgttatgaagcaatcttttaacacaagtaaactatattatggttttcctgtttttattttaggatatcaagattagaattttggctataacatcacgacctgtagttcctcttatagtctaggagattgggttgtgattggagtcgttgcgagagagaatgccgcagagcagatcaaacagtatcaaaaatttactgtgaatatttctgatgaaacttctatgcttgcgatggagcaggctggttttatcagtcatcaggagaaattggaacgtttgggagtgcattatgaaatttctgaacgaactcagactcctattttagacgcctgtccacttgttttagattgtcgggtagataggattgttgaggaagacggtatttgccacatctttgccaagattcttgagcgacttgttgccccagaactcctggatgaaaagggacattttaaaaatcaactgtttgccccaacctatttcatgggagatggatatcagcgcgtttatcgctatctggacaagcgtgtagatatgaagggcagtttcatcaaaaaagcgaggaagaaggatggcaagaactgagctgccagataaaatcgaaacagaacgtctcgttttacgagtccgcacagtggtggatgctgaggatatccatacctacgctagtttgccagaggtcgcctatccagcaggttttcctccagtcaagatcttggaagatgagatttattatctggagcacattcttccggagcgtactcaaaaggaaaatctcccagctggctatgggattgtcgtcaaaggaaccgataaagtcattggttctgttgacttcaaccatcttcatgcggatgatgtgctagagcttggctataccttgcacccagactattggggtcgaggttatgttccagaagcagcgtgttccttgattgatctagcttttaaagaacttggtcttcacaagattgaactaacttgctttggatataaccttcaaagtcaacgagtctcggaaaagcttggctttaccctcgaagctcgcataagagaccgcaaagatgctcaaggcaactgctgtgatgatttgagatatggcttgctgaggagtgagtgggaggtgatttgatgcatcttttcatcattggtgctccagcatcaggaaaaatgaccattggtcaagaattatctcgactgacggatgctaccctattttataaccatcaagccattgattttgcactagagatctatcaggattataccgaggagatgtgggaatttgttcgtggaattaccttttctttccttggagcaagtgcaagaaatcagcgatcagtaattttaacagacgtaattgatttttcaaatcagtaccagctgatgtatttaaagcaaattcaggatttattggataactttcatcaagagattctgtttgttgaattggaaacaagtcttgaagagtgcatacgtcgaaatcgaacggagaatcgattaaagcacaaacccttaaaacgacatattgaggtatctgaaagagaaattttagagaccgctgaaacacttcaattaaattcccaacatcaaccgaatgagttgcaccactactttaaaataaataatacgaatttgtctgcagaagaagctgctaagcaaattcaaaataaaataaacaaaatagagaaaggacacacacatgtctaaagaactttcacctaaatacaatccagccgaggttgaggctggtcgttaccaaaaatggcttgatgcggatgttttcaagccttcaggcgatcaaaaggctaagccttattcaatcgtgattccaccaccaaacgtaactgggaaacttcaccttggtcacgcttgggatacgactttgcaggatatcatcatccgtcaaaaacgcatgcaaggctttgataccctttggcttccaggtatggaccacgctggtattgcgactcaggctaaggttgaggagcgcttacgtggtgagggtattacgcgttatgacctaggtcgtgagtctttcttgacgaaggtctgggaatggaaagacgaatatgccactaccatcaaggaacaatggggcaagatggggctttctgtagactattctcgtgagcgtttcactcttgatgaaggtttgtcaaaagctgttcgtaaggtctttgtgaacctttacaagaaaggctggatctatcgtggtgagtttatcatcaactgggacccagcagctcgcacagccctttctgatattgaggtgattcacaaggatgtagaaggtgccttctaccacatgaattacatgctggaagatggttcacgcgcccttgaagttgctacaactcgtcctgagactatgtttggggacgttgcggttgcggttaatccagaagacccgcgctacaaggacttgattggtaaaaacgtcatccttccaatcgctaataaactcatcccaatcgttggagatgagcacgcagatcctgagcttggtactggtgtcgtgaaaatcacacctgcccacgatccaaatgacttcttggttggccaacgtcataacttgccacaagtcaacgtcatgaacgacgacggaactatgaatgagcttgcctttgaattttcaggcatggatcgttttgaagctcgtaaggcagtcgttgctaagttggaagaaatcggtgcccttgtcaaaatcgaaaaacgtgtccacagtgttggtcactcagaacgtacaggtgtcgtagttgagccacgcttgtctactcaatggttcgtcaagatggaccaattggctaagaacgccattgctaaccaagacacagaggacaaggtcgaattctacccacctcgtttcaacgataccttccttcaatggatggaaaatgtccacgactgggttatctctcgtcagctttggtggggtcaccaaatccctgcctggtacaatgctgatggtgaaatgtatgtcggcgaagaagctccagaaggtgacggatggactcaggacgaagacgtcttggatacttggttcagttctgccctctggccattttcaaccatgggctggcctgaagtcgactcagaagactttaaacgttatttcccaacttcaaccttggtaacaggttacgacatcatcttcttctgggtgtctcgtatgatcttccagtccttggaatttactggtcgtcagccattccaaaacgtgcttatccacggtctcatccgtgacgagcaaggacgcaagatgtctaaatctctcggtaacgggattgacccaatggatgtcatcgagaaatacggtgctgatgcccttcgttggttcctttcaaacggttccgcaccaggtcaagacgttcgtttctcttacgagaaaatggatgcttcatggaactttattaacaaaatttggaacatttctcgctatatcctcatgaacaatgaaggtttgacgctggatgtggcgcatgacaatgtcacaaaagttgcaacaggtgaggctggtaatgtgacggaccgctggattctccacaatctcaacgaaaccattgcaaaagttactgaaaactttgataagttcgagtttggtgtggctggtcatatcctttacaacttcatctgggaagaatttgccaactggtatgttgagttgaccaaggaagttctatacagcgacaatgaagacgataaggtcattactcgatctgttctcctctatacgctggacaagatccttcgtctccttcacccaatcatgccattcgtgacagaggaaatctttggacaaatctcagaaggttctatcgtgacagctgcatacccaactgttaatctagcctttgaagaccttgcggctcacactggtgtggaaagtctcaaagacttgattcgtgctgttcggaatgcgcgtgcggaagtaaatgtagcaccaagcaagcctatcaccatccttgttaagacaagcgatagcgacttggaagccttctttaacagcaatgtcaactatatcaaacgctttacaaatccagaacacttggaaatcgcatcaaccatccctgcacctgaactggctatgtcaagtgtcatcacaggagcagaaatctacctgccactggccgatctcctcaatgttgaagaagaactggcccgtctcgacaaggaacttgctaaatggcaaaaagaactggacatggttggtaagaaactctctaacgaacgcttcgtagccaacgccaaaccagaagtcgtccaaaaagaatgcgacaaacaagctgactaccaagctaaatatgacgcgaccgtcgcacgtattgatgagatgaagaagttggtgaaatgatgttaaaaacctaaccctatcgggttgggttttacatttgataatgttataataaaaaggagaaactttaggagaatactatggggaaaattgttgctattgatttatttaacggtgcaggtggcactacaagtggccttaaaaaatcaggcatagatgttcaagttgctgttgaaattgattccgtagctgttaaaacttataagttaaataatcctgaggtgtctgtaatagatatggagtaaataaaacttcaattttacaagctttatatggttctccagccaataaaagtgtgtctgaatattggtttagtacaaatgttgatcaaatagatgaagtggatgggaaacaatgtttaatctattcatattataacattaaagcttctagaaatgtagaagttcttaaaggccgttctggaacaaaaaaaggattagattattgggaaccatatgctcctcaaaaacaatatgagatggaaagattacccaaaaataaatatattggaagttcttcgacagacagatgggatggcattgaaaaaaatgttgtcttttgtgattgtaaagaatatgtttctgcttttgatttatttttctatcactataattttaaaaaaatttctactcaacgtagtaaacaagattttataagattacgatctaagccagttgctgatattttaaagaataatacaagtagctatacgcgttataaaaaggaaatggttatagataatgttaaagttgatgataaagtttgtgaaattattagtgaaataatggatgaatcttatacagacattcaaattttaacacataagttgtattcaaaaggtgatgatataaaagcttccaaaactatttggatgaaaaaatctggaaaagaatattccgaggcttttgcaggaacaggtgaggctagaattattttgttagtaaatgatatagtaaatgcgcaatcaaattcattaatattaatagatgaacctgaaatctcacttcatccgagtgcaatctataaatttaaagagtttttacttcaagagtgtttaaataaaaaacatcaaattattatcactacacattctacacaacttataaaagattttcctagagaagccgtgaaacttttagtgaaaaacggagaaaaggtagatgttattgaaaatattgattatcaggatgcattttttgaattaggtgatgtgtatcattctaggaagatgatttatgttgaagatagactagctaaatatattctagagtttgttatcactcattcaggtagtgagaatcttaaacagaatttagtagtgagatatattcctggtggagcaaatcaaataatttgtaataatattttaaactcatcgtatttagattccgataaccattatttttggcttgatggagatcaaaacactaatgttagtgaatcaaataatttaatgaactatcttgaaaatggtgttgttatatcagataaaattcctgaatcagataataaaaatcttgatgatattataaaattgataacgggatgtccaattaaatttaatgtttcaggtaataaagggcaaaaaaataatattgaattaattgcgaaacaaagaagctttatagattattgggctaaatacgtttcttatcttcctttcccaaccccagagttttttttagctaatttgtgtaacagcgtagatagggaaggttatgatttttctaaagatggcaacggaaaagaatattttagaaaaaaaactcaagtagcgttaggaatagagaatataacttctgaagatattttccaggagcaaagaagagctgtttcaaaaatacagccagaatcatcaatgtttcagtgtattaaagaaaaattagaggcattgttctaattccttagattaggtactacataacaaattttttaaattcaaacccgcaccaaaaacaacattgcaactttcttctcaggtaatgtgttgggatttgaacagaccaacgagttcatagtggtgtatgccaatgactttgataagtctacgcgtcagacttattagttcatttatccagatatatctcgataatcatattatttagtcaaagaacatcccatatgagggcatgaaatgctaagtttagcttgctcactattaagatgaagtatatatatttcatagaacctattgtgaaggatttttataattttcgccaattccatacctatttcacaatttaccgatgacacagaaaaacaattgaaaggatatttctatgcaaccaacttacaacattgacaatccaaacttgtcttatgaagcgaagcgtgatttatggcggataggttttggtctgcagaaagttgacaatctagtgccatcagcgtatatggaatctttggctgagaaacagtcccggggtgaactgacttatgagcaggtttatgaggatgcaacggcttatcatcataccattgatgcgagtacagaggaggcagacttggtttctctacgtattgtagaactattgtctcgaagaggctttagcttcagtcctgcgatcttacttgctattcataaggagttgtttcaagatatatttgaaccctcgattccggtaggtcaatttcgtcagactaatatcacaaagaatgaacctgttttgaatggtgaaagtgttgtgtactctgattactccatgattcaaatgaccttggattatgattttaatcaggaaaaacaagttgcatatgcgacactaacccaggcggatatggttaaaaaaatccagcattttatttcaggaatctggcagattcatccatttcgcgaaggaaacactcggacggtaacggtatttttgattcagtatcttcgtgagtttggttttgatattgataatacaccatttcagcaacattccaagtattttcgtgatgccttagtgttagataatgcaaagattttacagcgacgtcctgagtttttaacagctttttttgaaaatctcttgctcggtggtcaaaatgatttgtcttcagaaaaaatgtatctagatttagacctcgatctttcataatcctaatactgagtaaacattgaattttaggaaaaaatgaagtaaatattctcacaagaaaacgtatatcatcaaagtttggctctttgtcaattgtagtgggttgaagaaaagctaagttcgagaaaggacaaatttcgtcctttcttttttgatgttcagagcgataaaaatccgtttttttgaagttttcaaagtttcgaaaaccaaaggcattgcgcttgataagtttgatgagattattggtcgcttccagtttggcattagaatagtgtagttgaagggcgttgataaccttttctttatctttgaggaaggttttaaagacagtctgaaaaataggatgaacctgcttaagattgtcctcgataagttcgaaaaatttctccggttccttattctgaaagtgaaacagcaagagttgatagagctgatagtgatgtttcaagtcttgtgaatagctcaaaagcttgtctaaaatctctttattggttaaatgcatacgaaaagtagggcgataaaaatgtttatcgctgagtttacggctatcctgttgaatgagtttccagtagcgcttgatagccttgtattcatgggattttcgatgaaactgattcatgatttggacacgcacacgactcatagcacggctaagatgttgtacaatatgaaagcgatcaagaacgattttagcattcgggagtgaaacagtctgggagactgtttcagcctgagcctagaaatttgaaagcgaagctgtttagctaagtcatagtaaggactaaacatatccatagtaataattttgacgcgacatcggacggctctatcatatttaagaaagtgatctcggatgacagcttgtgttctaccctcaagaacagtgatgatatcgagcttttcaaaatcttgcgcaataaagctcatctccatctcccgattgaaacagtcactccccggactgtttcaacgtcccaagacataatcttaggcagatttctaaaattacactcaaagtggaagtcattgagctttcgaatgacagttgaagttgaaatggccagctgatgggcaatatcggtcatagaaatcttttcaattaacttttgcgcaatcttttggttgataatacgaggaatttggtgatttttcttgacgatagaagtttcagcgaccatcattttcaagcaatgatagcacttaaaacgacgttttctaaggagaattctagtaggcataccagtcgtttcaaggtaaggaattttatagggtctttaatgtctagtaattttgtgataaaatgtaattgttccatatgattctttctaatgagttgttttgtcgcttttcattatagatcttatgggactttttttctacccaaaataggctccataatatccatagggaatttacccactacaaatattatagagcccaaagttttaggtcgcttgataatatgcgttttttgaattttatagactgctcgtttaaactctatttacttcgtaccttctggagcgagacggaatattagtcacatacaaaatgagtactattaggattttattttcatgtacaatttcagccagtcttgttataatcagcctataggaatcaaggaggtgactcttatggctgtttttgtgtctttggatggaattgtggtagaagtccttgatgtcttttcttcttttaatggggatagtgagtttttcttgtgtatagcattttgaatctggaataggacgccatgactgctaaaagatttctataaattaatttgattttcctaatcaatttgttcatatcttatttcattccactataaacgtcttaaagacaagagtcagtttgttatggaacgctctcagttcgaggagatgttccaacttcaaagtagtcgcttgacgacgcaagaaaaattacaattgtttacctctgtgtttgctggccgttatgatgtttatgctaagaattttatcaatgaacaagggaaaattcagtattttccttcctatgattatggttggaagcagttgccacctgaaaaacggagtttccagacattgacgaactccgttttgaaatctcattttcgtggggaggcagctatcggtatctttcctatgcacttagatgatagctgttattttttggtactggatttggatgaaggagattggaaagaagctggtttaaccattcgaagaatagccagggaacgccagatggaagcccatttagagatttctcgttcgggtcacggactccatatttggttcttctttgaggaagcgattccgagtcgagaggctcgcttgtttggaaagaaactgatagaactggcaatgcaggaaagtatgcaactgtcctttgattcttttgatcgcatgtttccaaatcaggatgtccttcctaaggggggatttggaaatttgattgccttgccttttcaaggagaagcttaccatcaagggcgaacggtctttgtggatgaacagtttcagccttatgaagaccaatggaggtatctacaagaaattcagaggatttcaactgctaaagtggcactgttaatccaagaggagttaggcaagcaagaattggataaggagttgaaggtcgttttatccaatatgatccaacttgaaaaatcgtctgtgacatccaaggcacttttttcttgaaaaatatggcttccttttctaatcccgaattttatagtagattgaaactagaatagtacacctctgcttctaaaacattgttagaaatcgatttgactttcctgatcgatttgtcctgttattatttcattttactatatttaaagcaggctatgcgacagccaacctatcaaattcctgagagaatgtatttatttggagaatccgatcattatttatggttgccaagaggtttgctgtatccattgcaagataaatttaagcaggtatctgtggaagataggagaaaggtacaaaggtctattagcgtggaatttaagggagaactcacttttgagcaagagttagccctgtcagatatgacttctaaagaaaatggtttacttcatgcggagactggttttgggaagaccgttttaggtgctgctcttatctctgaacggaaaacaaaaacaattattctagtccataataagcaactcttagaccaatggctagatcgcttaaactgctttttgactttcgaagaggaggaggctatccgttatacggcatcaggtcgtgaaaaggtaatcggctatgttgggcagtacggtgggactaagaaatggctgagtaaactggttgatgtcgttatgattcaatctctatttaagttggaaaatagtcaaagtcttttggatgagtatgagatgatgattgtggatgagtgtcatcatgtctctgccttgatgtttgaaaaagttgttgctcagtttagagggaagtatctttacggtttgacggctacgcctgagcgtaagaatggtcatgagcctattgtttttcagagaattggtgagatactccatactgctgataagagggaaacggattttaaacggcaattgcaattaagattcacttcttttggtcatttggaaattgaaaagaccaaagcaagtaattttatacagcttagtgattggattgctactgactcagtgaggaatcagatgattctcaaggatattctagcccaagtggcagaaggacggaatatcttggttttagttaatcgaattcaacagatagatgtctttgaaaaattattgaaagagaaagaggttgatgactgttacattattagcggaaaaaccaaagtccgagagagaacgagtttactggagacgttagaacagttagataaagggtttgttttgttgtctactggaaaatacattggcgaaggttttgacttacctcagttggacacgcttatcttggcagcacccttttcttggaaaaataatttgattcagtatgcaggtcggattcatagaaactacaaggataagtctttggtgcgtattttcgattatgtggatattcatgttccttatttagaaaagatgtttcagaaacgacaagtagcttatcgaaagatggattatcgtgtcatcgagggtgaggagaaacaattcgtttatgttgatagtagatatgagaaggtgttgagagaggacttagcaggggaaagacaggaatgtctgcttattttaccttatgtgcaccagacaaaactgatgaattttctaaaagaatttaggattagtcaaattgagatatgtataccagagacggttgcaaataaagcatggctagaccagttgaagagccagaaaattaaagtgtcttttactcaatcaaaaatagtaacgcctattcttttggtgaataagactattgtttggtatggtgcaatgccattattagggaaggtagatgagatgaccatattacgtttggaatcagctagtatagtttctgaactagtggcaggtttacgatagagaaaatttttaaaaatttctatgtatgattttcatttctttagtgagactgttgccattatcacattcgaatcacacaaaataaaaaaatttttataagtacttgacaaatagattgaaatatcataaaataaaaacggttacagagttattaattatttaagcttcatgtcaccattaaaaattgaaataaaaggatgttatcactaatacaagtgagcaggaacctatttaatcacatcagaagaagtttcttgatgtttttaagtaggttccttttattttaaaagggaaattttatgatcataaaacgaatactaaaccacaatgccgtaattgcgcaaagtaaaaaagatatcgatattcttctttttggaaggggaatagcttttggaagaaaaactggagataaagtaaatccaattgatattgagaaaagtttttttctcaaaaatagagataatatgacccgttttacagagatgtttattaacgttcctttggagttggtgtacatcaccgaaaaaataattaacctaggtaaaataacattgggtaataattttgatgaaattatctatattaatttaacggatcatatttcttcgagcatagaacgttataaagaagggattattatttcgaatcccctacgctgggaaatatcgaaatattataaagaagaatttgaacttgggaaaagggctttacaaataataaaaaaagagttaggtattgaacttccaattgacgaagctgcattcatagcgctacattttgttaatgctaatttagaaaataattttcaagagtcgtataaaatcactgaaataattatgggaattgagaaaatcattcaagatttctattgtactgagtttaaccaagattctattgattattatagattcataactcatataaaattatttgcccatcgcttggttgaaaatacaacttattgtgacgatgatgatgaagacttgttagcattaatgaaaaataaatatcctagagaatatgaatgtggtgaacaggtagcaatgtttatacaaacggagtacaattatttgctgacttctagtgaattagtttatttgatggctcatattcgtcgcttaacaaaaaatttagattaatagaataggagaataccatgagttataaagatacggtacaaaaaatcctcgatgtaattggaggtgaaaaaaatgtcaatagagttacccattgtgtaacacgtttaagattagaattaaaagatgaaaatttagtcaatgatgatgatgtgaagaagataccaggtgtaataggtattatgaaaaagaatggacaatatcaaattatacttggtaatgatgtagctaattattataaagaattcgttaaacttggcaattttgaatccgattcagttgttcaagggcacaaagggaatattttagaaagaatcattgagtatatcgctggttccatgactccaatcattccagcaatgttagggggaggtatgttgaaagtcttggtaatcattttaccaatgcttggtatattgcaatcagattctcagactattgcttttttgacattttttggggatgctccatattatttcttaccgctgttattagcttattctgcatcacaaaaattaaaagtaacatctacattagctatgtctgtagcaggtgtacttctccatccaaattttgttcaaatggtgcaatcagggaatcctcttagtttatttggtgcacctgtgacaccagctagttatggttcatcagtcgttccaattcttattatggtttggttgatgaaatatattgaaaaaataattgctaaattaacactagctattactaagagttttttgcaacctacgctagtattattagtatcaagctgtattgccttagttgtagtcggacctattggagtaattgttggtgaaggattatcaaatctagttgggcaaatgtatggtgtagctggatggcttacattagctattcttggtgctattatgccatttattgttatgactggaatgcattgggcttttgcacctatttttttggcggcatctattgctactccagacgtattaattcttccagcaatgttagggtcaaacttagctcaaggggctgcttcgatggctgttgcattaaagagtaaaaataataatacaaaacaaattgcttttgcagcaggtttctcagccttacttgcagggattaccgaacctgcattatatggtgtgactttaaaatataaaaaaccgctttatgcagctatgattggtggtggattagcgggattatttgcaggtcttactagtgttaaagcatatctatttgctgtcccatctttgatagcgttgcctcaatttatttattctgatgtgccatcaaatattgtaaatgctttaattgtggcggtcatttcggttgttattacctttgtattagcttatatatttggaatcgatgaagaagagagttctagcaatttagaagttgaagctggagtttcaaataaaaaaatgatattttctcctatatcaggagaaatcattccgttaagcgatgtccaggataaaacattttcagataaactaattggagacggagtagcgattatcccaagtgaaggtaaggtttatgcaccatttgatgggaaaattacaaatatttttccgactaagcacgcaattggattgaagagtgatgagggtgttgagttactaattcatattggattagatactgttgagctaaaaggtcaaggttttattagtcatgtagaagaaggagacagagttttcaaaaatcagttgatttttgaaatggacttgaatttaatcaagactaaaggctacgaaacagttacaccagtaattgtaacgaataccaatgattttctagatgtattagtattacctaataatcagacaatcgagcattctaaggaattactggtaatattataatggaggaaagttatgaccatttttccagatgattttctttggggtggagctgttgcagctaatcaagtagagggagcatataatgaagatggtaagggcttatcagttcaggatgtgttacccaaaggtggattaggagaagcaacagaaaatcctacagaagataacttaaaattgataggtattgatttttatcataaatataaggaagatatatccttgttttctgaaatgggctttaatgtttttcgtacttctattgcatggagtagaatttttccaaaaggagatgaggaagaacctaacgaagctgggttgaaatattatgatgaattgtttgatgaactacatgctcacgggatagaaccacttgtaactctttcacactatgagactccattatatttagcaagaaaatatcatggatgggttgataggagaatgattcatttttatgaaaaatttgctcgaacagttttagaaaggtataaagataaagttaaatattggcttacatttaacgaagtaaactctgttttggaattaccatttactagtggaggaatagatatacctaaggagaatctttcgaaacaagaattatatcaagctatacatcatgaattagtcgcctcaagtttggttacaaaaattgctcgtgagattaattcagagtttaaggtgggatgtatggtattagctatgccagcttatccaatgactccaaatccaaaagatgtatgggcgactcatgagtatgagaatctaaattatctattttcagatgtgcatgttagaggttattatccgaattatgcaaaaagatattttaaggaaaatgacattaacatagagtttgcagctgaagatgcagagttattaaaaaattataccgtagattttttatcctttagctattacatgagtgtgactcaatctgctcttccaacacagtataattcaggagaagggaatattattggtggtttagtaaatccttatttagagtcttcagagtggggatggcaaattgatccaattggactacgtataattttaaatagatattatgaccgttatcaaatcccattatttatagtagaaaatggattaggtgctaaagatcaactaataaaagatgaacttaataacttaaccgtccaagatgattatagaattcagtatatgaaagaacatttattgcaagttgctgaagctctacaggatggtgttgaaattatgggctatacgtcttggggatgtattgactgtgtttctatgtccactgcacaactttctaaaaggtacggtctcatttatgttgatcgaaacgatgatggaagtggtacattaaatcgatataagaaaatgtcttttacttggtataaagaagtgattgaatcaaatggagaatccttattcaaatagttttttattgatgactagctattatcacggttaaggtggcatttcattaaatatggaataaagaagtttggaagacattaaattctaaacttctttattttataggggagtgtcaattaatttaattttgttacaaaaattataaatagttaatttagataaattgtttatataaatttagataagaataagctaacaagcagaagtaagataggtcttgcaagaatggtaaaaatctgataaactaagtagtaattgaataggaatctgaaagactagtagcccaagggaagtatatcagggaggagagccgtgactgcaagctctctatatgaaagctgggtgaattcacttgcgcatggatttagaaatgaaggtctgacttgtcagatgaaaacggatggtaccgcgtgtcaacgctccgagtggagtttttggcatgtggttttctttttatctacgagagactgatggaggaaatatgtcaactattgaagaacaattaaaagcgcttcgcgaagaaacgctggctagcttgaagcagattactgctggaaatgaaaaagagatgcaagatttgcgtgtctctgtccttggtaaaaagggttcgctcactgaaatcctcaaagggatgaaagatgtttctgctgagatgcgtccaatcatcgggaaacacgtcaatgaagctcgtgatgtcttgactgctgcttttgaagaaacagctaagctcttggaagaaaagaaagtcgcggctcaactggctagcgagagtatagatgtgacgcttccaggtcgtccagttgcgactggtcaccgtcacgttttgacacaaaccagtgaagaaatcgaagatatcttcatcggtatgggttatcaagtcgtggatggttttgaagtggagcaagactactataactttgaacgtatgaaccttccaaaagaccacccagctcgtgatatgcaggatactttctatatcactgaagaaatcttgctccgtacccacacgtctccagttcaggcgcgtgctatggatgcccatgatttttctaaaggtcctttgaagatgatctcgccagggcgtgtcttccgtcgcgatacggacgatgcgacccacagtcaccaattccaccaaatcgaaggcttggtagttgggaaaaatatctctatggctgatcttcaaggaacgcttcagttgattgtccaaaaaatgtttggtgaagagcgtcaaattcgtttgcgtccatcttacttcccattcacagagccatctgttgaggtggatgtttcttgcttcaagtgtggtggagaaggctgtaatgtatgtaagaaaacaggttggatcgaaattatgggggccggtatggttcacccacgtgtccttgaaatgagtggtatcgatgcgactgtatactctggctttgcctttggtcttggacaagagcgtgtagctatgctccgttatggaatcaacgatatccgtggattctaccaaggagatgtccgcttctcagaacagtttaaataatgattagaaaagtagaaatggcagatgttgaggtgttggctaaaattgccaaacaaacctttcgtgaaacctttgcgtatgataatacggaagagcagttacaggaatactttgaagaggcttatagtctgaaaactttgtcaactgagttgggaaatcctgactctgaaacctatttcattatgcatgaggaggagatagctggttttctcaaagtcaactggggaagtgctcaaactgagagagaattagaggacgcttttgaaattcaacgtctctatgtgctacaaaaattccaaggatttggactaggtaagcaactgtttgaattcgcacttgaacttgctacaaaaaatagtttttcttgggcttggctaggtgtttgggagcataatacaaaagctcaagcgttttataaccgatatggttttgaaaaatttagccaacatcattttatggttggtcaaaaagtagatacggattggttactgagaaagaaattaaggtaagaagaggattcttctattgaaatgataggaaaggaaaagaactagagtgacaactgtcattctggagaactaaattatgcttgtatcttataaatggttaaaagaattggtggacattgatgtgccatcacaagagttggctgaaaaaatgtcaactacagggatcgaggtagagggtgtcgaatcaccagctgctggtctctcaaaaattgtcgtcggtgaggtcttgtcttgcgaagatgtgccagagactcacctccatgtttgtcagattaacgttggcgaagaagaagagcgtcagatcgtttgtggtgccccaaatgtgcgtgctgggatcaaggtcatggtggctcttccaggagctcgtatcgctgataactacaaaatcaaaaaaggaaaaatccgtggtttggagtcacttggaatgatctgttcacttggtgaattgggaatttctgactcagttgtgcctaaggaattcgcagatggcatccaaatcttgcctgaagatgccgtgccaggtgaggaagtcttttcttacctagacttggatgatgaaatcatcgaactttccatcacaccaaaccgtgcagatgccctttctatgtgtggagtggctcacgaagtggcagccatctatgacaaggcagtcaactttaaaaaatttactctaacagaaactaatgaagctgcggcagatgccctttctgtcagcattgagacagacaaggcgccttactatgcagctcgtatcttggacaatgtgactatcgcaccaagtccacaatggttgcaaaaccttctcatgaacgaaggcatccgtcccatcaataacgttgtagacgtgacaaactacatcctgctctactttggtcaacctatgcatgcttttgacttggacacatttgaagggactgacatccgtgtgcgtgaagcgcgtgatggtgaaaaattagtgaccctggacggtgaagaacgagacttggctgagacagacctcgtgattacagttgctgacaaaccagtagcccttgccggtgttatgggtggtcaggctacagaaatttctgaaaaatctagtcgtgttatccttgaagctgctgtttttaatggcaaatctatccgtaagacaagtggtcgcctgaaccttcgttctgagtcatcttctcgctttgaaaaaggaattaatgtggcaacagttaatgaagcccttgatgcggcagctagcatgattgcagagcttgcaggcgcgacggtgcgtaagggtatcgtttcagcgggtgagcttgatacctctgatgtggaagtttcttcaacccttgctgatgttaaccgtgtcctcggaactgagctgtcttatgctgatgtagaagacgtcttccgtcgtcttggctttggtctttctggaaatgcagacagctttacagtcagcgtaccacgtcgtcgttgggatatcacaatcgaagctgatctctttgaagaaatcgctcgtatctatggatatgaccgcttgccaaccagccttccaaaagacgatggtacagctggtgaattgactgtgatacaaaaactccgccgtcaagttcgtaccattgctgaaggagcaggtttgacagaaatcatcacctatgctctgacaactcctgaaaaagcagttgagttcacagctcaaccaagtaaccttactgaactcatgtggccaatgactgtggatcgttcagtcctccgtcaaaatatgatttcagggatccttgataccgttgcctacaacgtggctcgtaagaataaaaacttggccctttatgagattggaaaagtctttgaacaaacaggtaatccaaaagaagaacttccaaatgagatcaacagctttgcctttgccttgacaggcttggttgctgaaaaagatttccaaacagcagcagttccagttgatttcttctatgctaagggaatccttgaagccctatttactcgtttgggactccaagtaacctatacagcaacatctgaaatcgttagccttcatccaggtcgtacagccgtgatttcactcggtgaccaagttcttggtttccttggccaagtgcatccagtcactgccaaggcttacgatattccagaaacgtatgtagctgagcttaacctttcagccatcgaaggggcgctccaacctgctgttccatttgtggaaatcaccaaattcccagcagtcagccgtgacgttgcccttctcctcaaggcagaagtgactcaccaagaagttgtagatgctatccaagctgccggcgtgaaacgtttgacagatatcaaactctttgacgtcttctcaggtgaaaaactgggacttggtatgaagtcaatggcttatagcttgaccttccaaaatccagaagacagcttaacggacgaagaagtcgcacgctatatggaaaaaatccaagcgtctctcgaagaaaaagtcaatgcagaagtgcgttaaacgatagtaggatacaaattccccctctagtttatgaacattagaggggtgattttatataaaataattaaaatgtgatttctgtaaaaatacatctatgatcagagttttgaaaacttacaatgtctaaatctttaacatagtagtggtttttaggcaataaaatatgatctattgttgcattaaaaagttttggactttggctattccaagttcctctttcaaaaggtggcagtgcatttaatgcgtccctatgagagcttatttttgcaagtgctccatgacgcatagttgcattaaaatcacctgcaataatagcctttggatattttgaagccaattgattatgaatgatgtttaagtcttgcttccagatttccattaaacctggcagaggaggcgcagtatgcaaggcaatgatatctggtatattttgttttctcgaatgtaatacaattgtcccgaaccgtgttgtatgaaaagttttagcttctgtatagaaaccataacttttcttgacaatcacagtcacaggagctattccactattggtaggtggagaagtgaaaatatcatagttggccatagaaagtccaacttgatgaaacaatagtttgattctctggttttcttgctcacctctgatattggtagctagttcagggaatatagccatatcggcgtcaaaatggctaaaaattcgctcaatatgttgtgcttctatttgattagcgacgttccaagttactaattttaaggttttagtcttatttgatgcagaagaaagggttttatctgttccgaataatagtaatatgagcgatagtaagagcaaaatgccagagtaaaaccgtatttgtttatttttcttgtaaaaagataggaaaaaaaataagaaacttaaaatagcagccatagttgcagtagctaaggggaaggcataaatctgtgccaagataggttgggtagatagccaaatgttaagattagaagatgggaaaaaagaataagttatgatagggatagaaaagagaatgaccgaaagggcagagagaaatgttttaatcattgtgtgagtacctcaatttgcaatggttgctcggagctaatgtgactttgtgactttacttgattgatattctttttcttgtcttcctcatagattaagtacaacccaagtaaaaaaagtccaatttaagattgaaatgattaaaaggcacagaaatgcaagacaattatactacaaaaggcaaacatttgacaatcgatagccgtcgcttaatcgaacgatggaaaaaagaaggaaaatcaaatagagaaattgcctctctacttggaaaagctcctcaaactatccacactgaaatcaagcgtgggacagtccgacaatgtcttggaaaagggcgcttcaaagagatttattctgccgactacgctcaacagtcttaagaaactaaaggaaaagattctccactatacataaccaaaaacataaccaaaaattttcgcctgaaatgatggtgatggctaaaggggttaacgtgggaatttcaaccatttactattggattcatcgtggaaaattggggttaagcaagcaggaactgctttatcctagaaaaggaaaatcgcttaagaaataggctagcaccaactttaaacccactggtcaatctatcgaatcataattcgctcatttttttaaaaatacatagacgtaaaaaaaagagggttaagtgatgaagaatagtgctattgggagtaattggaaggatgtccatctgagctctttagcaaggaggaaatccttgaaagtgatatgcgagtggctatcatgagcgagttgattgaggctaggtatgaacaaggaatcagtcagaaaaagctggaagaagtcagtggaataagccagcctgtcatagctaggatggagacaggaaagactagtcctcagttggatacagtcttaaaagtcctagccagtttaggaaagacactagcaatcgtcccacttgaacagggaaaaagttgactagaatcagttatagtcttttctaataacaggtcatagtcacttataagaattactaataacatgttttagtattctaattggaatatagctgtaaagtaagaattacaaaggatttgagacgtttgcttcaagtctttttcttttgtccgaaacagatatatagtttcaaactatatcaaaccctaattttttacaattatacagacgctttcttttctgttaagatagtttcaacaacaaattttggaggacacatcatgtcaactacaatcatcggtttccctcgtttgggcgaattccgtgaattaaaatttacaactgaaaaatactttagaaaagaaatctcagaagaagaacttttagcagcagcaaaagacttgcgtgctaaacactggaacattgtcaaagaaaaaggcatcactgaaattccatcaaatgacttttctcactatgataacttcctagatgcggctttccttttcaacgtggtgcctgcatccgttcaaaacttggacttgtctgaccttgagcgctacttcgctttgggacgtggttaccagggagaaaaaggggacgttcgcgcccttccaatgaagaaatggttcaacactaactaccactacatcgttcctaaatttgaaaaagacactcaagtaaaattggctggtcacaagattttcgatgagttccaagaagccaaagaacttggattgaacactcgtcctgttcttgtaggtcccttcactttccttcaattgtcagactttgaagaaggcgtgaaagcagacgacttcgtagatagcttagtggctgcttaccaagaagtttttgctaaattggctgaacttggtgcgactcgcatccaattggatgaagcggctcttgtaaaagacttgacagctgaagaaaaagctctcttcttgaacctttacaacaaactcttggctgacaaaaaaggtcttgaagtcttgcttcaaacttatttcggtgatgttcgtgacgtatacgctgaccttgtaaacttaccagtagatgctatcggtcttgactttgttgaaggtaagaaaactcttgaactcgttaaaggtggcttcccagctgacaagactctctatgtaggtattgtcaatggtaaaaacatctggcgcaacaactacgaaaagagcttggctgttcttgagcaaattccagctgaaaacatcgttttgacaagctcttgctcacttcttcatgtgccatttacaactgctaatgaagaatttgaaccagcactcttgaaccactttgcctttgcagttgaaaaattggatgaaatccgtgacttggatgctatccgaaatggtcaaggttcagaagctcttgcagccaacaaagaactctttgcgactgagcgtgttggtgaaaatgctgaacttcgtgcgcgtatcgctggcttgacagacgcagactacactcgtttgccagcctttgcagaacgtgaagctatccaagaagaagctttcaaacttccagctcttccaacaacaacgattggttcattccctcaaacaaaagaagttcgtgccaaacgtttggcttaccgtaaaggtgaattgtctcaaaaagagtacgacgctttccttgctgaaacgattgacgaatggatcaagtggcaagaagatattgactttgatgtccttgttcacggtgaatttgagcgtaatgacatggttgagtacttcggtcaaaacttgtcaggatacctcttctctaaaaatggatgggtacaatcatacggtatgcgtggggtaaaaccaccaatcatctggggtgatgtcactcgtcttaaccctatcactgttaaatggtctagctatgcacaaagtcgtacaaacaaacctgttaaaggtatgttgactggacctgttaccatccttaactggtcattcccacgtgaagacatctctatcaaggattcaactctccaaatcgcccttgctatcaaggatgaagtacttgaccttgaagctgctggtgtgaaaatcatccaaatcgacgaggctgctcttcgtgaaaaattgccactccgccgtagcgactggtacgaagactaccttgactgggctattcctgccttccgcttggtacactcaacagtagcgccagacacacaaatccacactcacatgtgttactcagaatttacagatatcatcccagctatcgataacatggatgcagacgttatttcctttgaagctaaccgttcaaaccttgaaatcttggacgaactcaaagcgaaaaacttccaaacagaagtgggacctggggtttacgatatccactcacctcgtgtaccaaatgaaggcgaaatcgacaacacaatcgaagccatccttgctaaagtgccaagcaagaaagtttggatcaaccctgactgtggtttgaaaacacgtggtatcccagaaacaaaagaaagcttgatccgccttgttgaagcagctaaagctgcgcgtgagaaattgtaagattggatttctctccatacagtggttgttcaaaaagaaatcaactagaaaaggttattacatatgtcacgccaaacaccgtcactctcatttgaagtgttccctccaaacccagccgtgggtaatgataacattatttcagccttgcaggatatgcaggagttggctccccattttatcagtgtaactgccagcaataataaatttaatatcaaggaaacgacggttcgtttggctgactttatccaaaatgatttggcgattccgaccattgcccacttgccagctatttatctaactaaggacaaggttgctgaaactattgctgacttggacaaagttggggtgcagaaaatcttggctcttcgtggggatattattccagacgtggaaccacaaaaggatttccgctatgcaaccgacttgattgagtttatcaaggaacaaacccctcactttgatattattggagcttgctatccagaagggcatccagattcgccaaatcagatttcagatattcaaaatcttaagaagaaagtggatgcaggctgttcgagcctcgtaactcagctcttctttgacaatgagcgcttctatgattttcaggacaagtgtatcttggctgggattgatgttcccattcatgcaggaattatgccaattctgaatcgaaatcaggctctccgactcttgaagacttgtgagaatatccatcttccacgcaaatttaaagccatcttagacaagtatgagcatgaccctgagtcgctcagagcagcaggacttgcctatgcagtggaccaaatcgtggacttggtaactcaggatgttgccggtgtgcatctctatacgatgaataatgctgatacagcaaaatacatccatcaagcaacccatgccttgtttaatcaccagtctctaggataataaaagcaaaccattcttctcaggtgaggggaatggttcctttttaatggtaaagacctcactttttaagaaaaatatgataaaataaattctgtacgtacttgatacaaagatgaaggtattaaataatacaatgcatttaaactgtaagatttaacgacacgagtgagtcaaatcgatgttatttgacgagagagttagtaaagcatttagctaatcgcccgatagcgattagcgtgaaagctttagatactttagtattaaacctttctaatgatgtatcttgaaaactgaacttgcctacaactctgtggaaaaagataaatctccctaggagtagtcgctccgtcgttcgatttcctatcttcctttgagttgcttgacggcttggtatcttgatgacttgaattttggtctcatttcttaggaaaaaagataagcttcctagcactcgtcgagtgcgacgtcaccttcctatttttctacagaaatgttcggcaagccgaaccgtccaaaatatcttgtgtaattgaacacggccgaaaagctgtgtaaaaaagataaactgtcttgtcttcatcgaagacttcgtcagtttcctatttttactttgcttttgacgtccttggtatcttgatctttgtaggcaaggcgtataatttcatcaatccaaaggggattaaaatggcaaaacaagtgtttcaaacgacttttgcgggtcgtgagttaattgtagagactggtcaggttgctaagcaagcaaatggatctgttgtcgtacgttacggtgagtcaactgtcttgactgctgccgttatgtctaagaaaatggcaactggggatttcttcccactccaagtcaactacgaagaaaaaatgtatgcggctgggaagtttcctggtggctttatgaaacgtgaaggacgtccttcaacagatgcgaccttgacagcgcgtttgattgaccgtccgattcgtcctatgtttgcggaaggtttccgtaatgaagtccaagtcatcaatacagtgctttcttatgatgaaaatgcatctgcaccaatggctgctatgtttggttcatctttggcactgtctatttcagatattccatttgacggaccaattgctggggtacaagtgggatatgtagatggccaaatcatcatcaacccaagtcaagaacaagcagagcaatctcttcttgaattgacagtagctggaaccaagcacgctatcaacatggtagagtctggtgccaaagaattgtcagaagaaatcatgttggaagcgctccttaaagggcacgaagctgtcaaagaattgattgccttccaagaagaaatcgttgctgctgtcggtaaagaaaaagcagaagtggaattgcttcacgtggatgctgaattgcaagctgaaatcattgcagcctacaacagtgacctccaaaaggcagttcaagtagaagagaaattggcccgtgaagctgcgactcaagtagtgaaagaccaagtgactgccgtttacgaagaaaaatatgcggaccacgaagaatttgaccgtattatgcgtgatgtggctgaaatcttggaacaaatggaacacgcagaagtgcgacgtttaattacagaagacaaggtgcgtcctgatggtcgtaaggtcgatgaaatccgtcctttggatgcggttgttgacttccttcctcgtgtacatggttcaggtctctttactcgtgggcaaactcaagctctttcagtcttgaccttggctccgatgggagaaactcaaatcattgatggtttggatccagagtacaagaaacgctttatgcaccactataacttccctcaatattctgtaggggaaacaggtcgttacggtgcgccaggtcgtcgtgaaatcggtcacggtgcccttggtgagcgtgctcttgctcaagtcttgccaagcttggaagaattcccctacgctatccgtctagtagcagaagttttggaatcaaacggttcttcatctcaagcttctatctgtgcgggaactcttgcccttatggctggtggtgtgccaatcaaggcgccagtagctggtattgctatggggcttatctcagatggaaataactacacagtattgacagatatccaaggtttggaagatcactttggagatatggacttcaaggttgcaggtactcgtgatgggattacagcccttcaaatggatatcaagattcaagggattactgcagaaatcttgacggaggctcttgctcaagccaagaaagcgcgttttgaaatccttgatgtcattgaagcaaccattccagaagttcgtccagaattggctccaactgctccgaaaattgatacgatcaagattgatgtggacaagattaagattgtcatcggtaagggtggagaaaccatcgacaagattatcgctgaaacaggtgttaagattgatatagacgaagaaggaaatgtgtctatctactctagtgaccaagatgctattaaccgtgccaaagaaattattgctggtttggttcgtgaagccaaagtggatgaagtttaccgtgctaaagtcgttcgtatcgagaaatttggtgcctttgttaacctctttgataagacagatgcccttgttcatatctctgagatggcttggactcgtaccaatcgtgtagaggatttggtagaaatcggggatgaagttgatgttaaggttatcaaaattgatgaaaaaggccgtatcgatgcctctatgaaggctcttctacctcgtccgccaaaacctgagcatgatgaaaaaggtgaaaagtctgagcgccctcaccgcccacgtcatcaaaaggattacaaacctaagaaagaatttacagaaacatcaaaagattcagaataagaaaaggagaaatgtatggggtggtggcgcgaaaccattgatattgtaaaagaaaatgatccagcggcccgcaccactttggaggttttgctgacttatccaggtgtcaaggccttggcggcccaccgtctctcgcattttctctggaagcacggcttcaaactattagctcgtatgtacagtcagttttggcgcttttggactcagattgagattcatccaggagcccagattgattcaggtgtttttattgaccatggttctggtctggtgattggagagacagcgattgttgaaaaaggcgttcttctctatcacggagtgactctcgggggaacagggaaagactgtggcaaacgccatccgactgtacgaaagggagccctcatatcagcccatgcccaagttatcgggcctgtggaaattggtgaaaatgccaaggtcggtgctgcagcagttgtcgtagcagatgtacctagtgacgtgacggttgtcggtattccggccaagattgtccgtcttcatggtaagaaagatgagcctgtcattcacgaagtcgaagaaaaacgagagtattatgtcaataaactcgagcaggctaaagatgccagtcacagatcgtctggtttgtagaggatacctatatgattcaagcaagaaacaagttaagccaagaggagctatctgaggcgaaaaaagtaattaactgttgccaaaactatgacggtacctatcgcgatccctatctctctaacatgcttaattttgacccaaacatgcccgcctttttcctttattatgaaaaaggcgaacttgttggtttattaactgtctatgcagatgaccaagatgtagaagtgacgatactggttcatccaggtcatcgccgtcaggggattgcgcgtgcattgtttactagttttgagagagaaacagcttctttccccattcggtcagtcacttttcagacagaacgtatttttttagagaatcatcctgactttgccagtaactggggactaatcgaggatgaagagacagaaacttggttaggtaaggatagaagaccttatccgttagcaaatgtttcccatcttgaagttttgttagcagatagttcgtatcaggatcaaattagtcaattaaaatttcaggcattttcagaggaacatgaatcgagagaagttgtggatagatatgtcgctgaagctctgaaagatccagaaagccgactatatattttattaaaagctggtcaggttattggaacttgtacggttgatttatcgactaatacgaattacctctacggtttagcaatattggaacctgaacgtggaaaaggctatggaagctacttagcaaaatccctcgtcaaccaactaattgagcaaaatgacaaggaatttcagattgcagtggaagatagcaatgtaggtgccaaacgtttgtatgaaaaaattggctttgtcaaacagactcaggtggtttatctgaatgagaaaggagcaagggattccgaagtgtagagatattcggactgaaatttacttgaacttttagtgatgaaactaattgttcttggatttcagctttcctgattatgatttatgattaaaatctatgacaccatgtctcgtgatttgcgagaatttgtcccgattgaggacggcaagatcaagatgtatgtttgtgggccaacggtgtacaactatatccacgtaggaaacgcccgttcgacggtagcttttgatacgattcgtcgctattttgagtaccgtgggtataaggttgcctatatttccaattttacagatgtggatgataagattatcaaccgtgccagggaagaaggtatcacgcctcaggaggttgcggataagtacatcgctgcctttcgtgaggatgtgacggcattgggcgtgaaacctgcgactcgccatccgcgtgtagtggagtttatggcagacatcatccgttttgtggaagacttgatcgagaaaggctttgcctatgagagtcaaggggatgtctatttccgtgtagaaaaatcccacaactatgctaaattggctaataaaaccttggaagatttggagctaggtgcttcaggtcgtaccgatgaagaaacggctcgtaaggaaaatcctgtagactttgctctatggaaatcttccaaaccaggtgagatttcttgggatagtccttggggacctggacgtccgggttggcatattgagtgttcagtcatgtcgacagagattttaggtgataccattgatatccacggtggtggagctgacctagagtttccacaccacaccaatgaaattgcccagtctgaagctaaaacaggcaaggcttttgctaactactggatgcacaatggctttgtcaatatcgacaatgtcaaaatgtctaagtccttgggtaacttcattacggtacacgatgcccttaaaactcttgatgggcaagtacttcgtttcttctttgcgacccagcactaccgtaagcctatcaacttcacggaaaaggcagttcgcgatgccgagaccaatctcaagtatctcaagaatacttacgaacaaccatttacaggaaatgtggatgcccaagagttacaaaactttaaagataagtttgtagcagctatggatgaagattttaatgctgccaacggtatcacagttgtctttgaaatggccaaatggatcaactcagggaactatgatgcaagtgtcaagcaagctcttgcagatatgttagaaatttttggaattgtctttgttgaggaagttttggatgcagagattgaagacttgattcaaaaacgccaagaggcgcgtgccaatcgtgactttgcgacagcagaccaaatccgtgaccaattggttactcaaggaattaagctccttgataccaaggatggagtgaggtggacacgtgattgatgtcaatctcattaacgggattgcgctagcctttgagggggatgcggtgtattctatgtatattcgccgtcacctcatcctcaaaggtatgaccaaacccaataaactccatcaagaagcaactaagtacgtgtcagccaaggctcaggctcgcctgattgctctcatgttggaggagcaggtcctaacggaaaaagaagaagaaatctacaaacgtggccgcaataccaatagccacacaaaggctaaaaatgcagatgtcgtgacttatcgtatgtccacgggatttgaagcggttatgggctatctccatatgactgagaatctggaacgtcttgagagtttggtttcatggtgcatccaaaaagtggagggctagaacatgagggcaaaagaactacaagactggtttcctgaggctcggatttcagaccaaccagtagagaaagagggctatctcacgctccctttagcttctcagcagtggattttgctggaggaagctgggctcagcgagcgtgaaaagcagttggttgcccttttgacccagcaggagcaggctcgttcgctaaacccttggtattcctatctggttgagggcaagggacaggcaccgcaagtttttaaaaagattcagttggtttattgccatctttcttattttcagcaggaaaatctggcttcttggctagatatgatgcggactctttttccgaattgtcagacagtgctacaggtcggagctcaggattatgttttcgtgcttcaacaagacaaatacacttctgtaagagatattttaagtgatacgattgaagcggttgagtatgactttggacttcgtctttctatcatgttgggtcaggtttggtctcagacgggacatcaagccctatcagacttaatcaaagctgagcgggatttgttcaagacatggtggcgtcagggtcaccaaggtgttcatactttttctcagctctatctttggagtatgggagaaagactcgtggacttgaagccaatcaaggaatgtctacaccagatgattttggatcaagatcagattcaggaaatcattctctctctttgggaaaatagtgctgttctcactaaaacagcccagcaactctatctgcaccgcaattctctccaatacaagattgataaatgggaagagttgacagggcttcagttgaaagagttgaccgacctgaccttgtgttatcaattgattttaggttctttgtcaactatagttggtttgtaaagaagttaatatttggagaagaggattgccatcttctccatttttatgtgcagagttatagtggcttgatgctgggaaagtacactgtgactgctaaaacattcctagaagctgctttgatttccctaatctatttatgcaaattttatgttattttactataacagttgttgctaagccaaataatagtggggaagttcatttagacgtaagcattgaagataatcagggaggtagtgggtataatttcagttctgtttcaagtagctcacaaacagctaaatatgaaggaactgtttataataacaattcatcattatatataacgattgataaaacgtctgatgcaacagctcttttgaaattaaagttgaataatgttgataatcaacctgctactgaagttcctagttcaggaattactgtaaaattaaatgctaaagataatgctggaaactggacaagtgcttcgaataaaaaagaagtaacagtaaaaattgtttctgctaaaccgacatatccagacaaaatcttagtgaaaaatcctgataatataaaagatacagaaaaaatgccattattgaaaaattgaaagaggcaaataaaaatcatccagcaggagctccaacctttgctaaaggtgaaggagagcatgcaaatgatattgtagcaacttattcagatggtacaacttattatgtaccgttaaatgatgtgacaaaatatgcgaggtagtggctgtaccactcacttattcacctccccgtgatttgtagtagtgataggttttctcactattattataaaacaaaataaagatcacaacactttttcattctgtgttgtgccttgagtgaaacgaaaggaatgaattataaatatgaaaagtatagtcactagcatagatgagcgcttgcgtactcgcctacgagtgattatctggaagcaatggaagaagaaatcgagacgattatggggattgcttaagttaggggttcctaaatggatagcagataaggtatctggctggggcgaccactatcaattatagtaaaatgaaataagaataggacgaattgttcaggacagtcaaatcgatttctaacaatattttagaagtagaggtgtactattctagtttcaatctactatagtagctcagaagtcggtacttaaacgtgctatatcaaaaccagtccttgaaaaacgtggactggtttcgtgtttggattattaccttgaacgacatgcgttaaaagttagttgaaccgccgtatgccgaacggcacgtatggtggtgtgagaggggctagagattatcccctactcgatatttttttttcgtatttcataaatatttcatatttgggttttataatagtcttacaaatatggaggtgacaaatgaatccaatccaaagatcttgggcttatgtcagcagaaagcgactgagaagttttattttatttctgattttattggtcttattggccggaatttcagcctgtttgactctgatgaagtccaacaaaacagtagaaagcaatctttataaatcactcaatacatctttttctattaagaagatagagaatggtcagacattcaagttgtcagacctagcatctgtaagcaagattaaggggctggaaaatgtctctcctgaacttgagacggtcgcaaaactaaaagacaaggaagcagtgactggcgagcagagcgtggagcgtgatgatttatcagctgcagacaataacttggttagcttaacggctcttgaggattcatccaaggatgtaacctttaccagttcggctttcaatctaaaagaagggcgacaccttcaaaaaggggattccaagaaaatccttatccacgaagaattggctaagaagaacggtctttcgcttcatgacaagattggcttggatgctggtcagtctgaatctggaaaaggacaaacagtagagtttgagattatcggcatcttttctggtaaaaaacaagagaaattcacaggcttgtcttctgacttcagtgaaaatcaagtctttacagactatgaaagtagccaaacccttttgggcaatagtgaagctcaagtcagtgcagcacgcttctatgtagaaaatcctaaggaaatggacggactcatgaagcaggtagaaaacttggccttggaaaatcaaggctaccaagtcgaaaaggaaaacaaggcttttgaacaaatcaaagactcagttgcaactttccaaaccttcctgaccatcttcctttatgggatgttgatagcaggagctggagccttaattctggttttgtctctctggttgagagaacgggtctatgaagtggggattttacttgcacttggaaaaggcaagagctcgatcttcctacaattctgtttagaggtagttttggtatctcttggagctttgcttccagcatttgttgcaggaaacgcaatcacaacttacctactccaaactctactagcaagtggagatcaggcaagcttacaagatacactagccaaagcaagcagtttatcaactagcatcttatcttttgcagaatcctatgtttttctagttctgcttagttgcttatctgtagccctttgtttcctattcttatttagaaaatcaccgaaagaaattttatcatctattagttaagaaggagaaatcatgactttattacaattacaagatgttacctaccgttataagaatactgctgaagcagtcctatatcagatcaattataattttgaacccggaaaattttacagtattattggggagtcaggagcaggaaaatccacactcttgtccctacttgctggtctagatagtcctgttgaaggttctatcctttttcaaggagaggatattcgtaagaagggctattcttaccatcgcatgcaccatatttccctggtctttcaaaattataacttgatagattatctttctccgctggaaaatatccgattggtcaacaaaaaggcaagcaagaatacacttcttgagcttggtttggatgaaagccagatcaagcggaatgttctccagttatcaggtggtcaacagcaacgtgttgccattgctcgcagtttggtctcagaagctccagttattctagctgatgagccaacaggaaatctggatcctaaaactgctggagatattgtcgaactactcaaatcacttgcccagaaaacaggtaaatgtgtgattgtcgtaactcacagtaaagaagtggcacaagcgtcagatattacacttgaattaaaggataagaaactgactgaaacgcgcaatactagtaaataatttgagcttattttaatagaatgattaaaacaaaatctagaaagggaatctatgttacacaacgcatttgcctatgttacaaggaagtttttcaaatcgattgtcatcttcctgattattctcctcatggcgagcttgagtttggtcggcttgtcaatcaagggagctactgccaaggcttctcaggagacctttaaaaatatcaccaatagcttctccatgcaaatcaatcgtcgcgtcaaccaaggaacgcctcgtggtgctgggaatatcaagggtgaagacatcaaaaaaatcaccgaaaacaaggccattgagtcttatgtcaaacgtatcaacgctatcggagatttgactggatatgacctgattgaaacgccagaaaccaagaagaatctcactgctgatcgtgccaagcgttttggaagtagcttgatgattacaggtgtcaatgactcctctaaagaagacaagtttgtctctggttcttataaactagtcgaaggagagcacttaaccaacgacgacaaggataaaatcctcttgcacaaggacttggcagccaaacacggctggaaagtaggggacaaggttaaactggactctaatatctacgatgcagataatgaaaaaggagccaaggaaacagttgaagtgacaatcaagggactctttgatggtcataataagtcagcagtaacctactcacaagaactttacgaaaacacagctattacagacattcacactgctgcaaaactttatggatacacagaagacacagccatttatggggacgcaaccttctttgtaacagcagacaagaacttggatgatgttatgaaagagttgaatggcatcagtggtatcaactggaagagctacacactcgtcaagagctcctctaactacccagctcttgagcaatctatctctggtatgtacaagatggccaacctcctcttctggggtagcttgagcttctcagttctcctccttgccctcttgctcagcctttggatcaacgcccgtcgcaaggaagtgggaattctcctctctatcggcctcaagcaggcaagtatcttgggtcaattcatcaccgaatctatcttgattgctatccctgctctagtttctgcttacttcctagctaattacactgcccgtgcaattggaaacactgtccttgccaatgtgacttcaggtgttgccaaacaggctagtaaggcggctcaagcctctaaccttggtggtggtgcagaagtagatggctttagcaagaccttgtcgagcctagacatttccattcagacatcagactttatcatcatttttgtccttgccttggttctagtggttctcgttatggcgcttgcttcaagcaatctccttagaaaacaaccaaaagagctcttgctggatggtgaataaatttgaaaaaatgagtctagaataaagattgcatcttgtgtttctattcaagaatagtggataggaatggctatttaacaattcaaaataaatccgaaagcagtggtgaaaatcattgctttcagttgctttctttgtactttagtgcttaaatataatatactaaagttatggaatttatgagaaaggaatttcacaacgttttatctagtggtcagttgcttgcagacaaaaggccagcaagagactataatagaaaatagggtaggtatttattctaagaaaaataaaaaatagagagcagttaaagtatgaaaattttaattgtagaagatgaagagatgatccgtgagggggtcagtgattatttgacggattgtggctatgaaactattgaggcagcggacggtcaggaagctctggagcaattttctagctatgaggtggccctggttttactggatatccagatgcccaagctcaacggcttagaagtcctagctgagattcgtaaaaccagtcaggttcctgtcttgatgttgacagcttttcaagatgaggaatacaagatgagtgcctttgcctctttggcagatggctatctggaaaaacctttctccctctcccttttaaaagtgagggtggacgcgattttcaagcgctactacgatacaggacgaatcttttcttacaaggataccaaggtggactttgaaagctacagtgcaagcctcgcaggtcaagaagtgcctatcaatgccaaagagttggaaattctggactatctagtgaaaaatgaaggccgggccttgactcgatctcagattatcgatgccgtctggaaagcgacagatgaggttccctttgaccgtgttattgatgtttatatcaaggaattgcggaaaaagctagacttggattgtatcctcactgtgcgcaatgttggttataaattggagcgaaaatgaaacgaacaggtttatttgcaaagatatttatctataccttctcgatatttagtgttctggttatctgccttcatttagctatttattttctttttccttcgacttatctgagtcatcgtcaggaaaccattggtcaaaaggcaacagccattgcccagtccctagaagggaaagataggcagagtatcgagcaagtgttagacttgtattcccagactagtgatatcaaggggaccgtcaaaggtgagatgaccgaggacaagttagaagtcaaggacagtcttcctctggacacagaccgccagacaacctctctctttattgaggagcgcgaggtgaaaacgcaagacggtggtactatgattctccagtttctagcttccatggatttacaaaaggaagcggagcaaatcagtctccagtttcttccctataccttgctggcctcctttctgatttcccttttggtggcctacatctacgctcggactattgttgcaccgattttggaaatcaagcgggtgacccgtcggatgatggacctggattcccaagtgcgattgcgcgtggattctaaggatgagataggtaatctcaaggaacaaatcaatagcctctaccagcatctcttgactgttattgcggacttgcatgaaaagaatgaagccattctccagctggagaagatgaaggtcgaattcctacgaggagcttctcatgaattgaaaacaccgctggctagtttgaaaatcctaatcgaaaatatgagagagaatatcggtcgttataaggatagagaccagtatctgggagttgccttggggattgtggatgaactcaatcaccatgttctgcagatactttccctctcttctgtgcaggaattgcgagatgatagggaaacaattgacctcctccagatgacgcaaaatctggtcaaagattatgccttgctagccaaggaaagagagctccagatagacaatagtttgacccatcagcaggcttatctaaacccatcagttatgaagttgattctttctaatctcatcagcaatgccattaagcactctgttccaggtggcttagttcgaattggagaaagagaaggagaactttttatcgaaaatagctgtagctcagaggaacaagaaaaactagcccagtctttttctgacaatgccagtcgcaaggtcaaggggtctggtatggggctctttgtggttaagagtctattagaacatgaaaaattagcttatcgtttcgagatggaggagaatagtttaaccttctttatagattttccaaaagtcgtccaagactagggagagaaagggtttacatagatggagttagaagaaaatcaatcgaaactgcgggaaaaactagatttttttggcaaaaagtgataaaatgaacaatgtaaatgggatgacccataaaaatatacaggaggcctgataaaatggcaatcgtttcagcagaaaaatttgtccaagcagcccgtgacaacggttatgcagttggtggatttaacacaaacaaccttgagtggactcaagctatcttgcgcgcagcagaagctaaaaaagctccagttttgatccaaacttcaatgggtgctgctaaatacatgggtggttacaaagttgctcgcaacttgatcgctaaccttgttgaatcaatgggtatcactgtaccagtagctatccaccttgaccacggtcactacgaagatgcacttgagtgtatcgaagttggttatacttcaatcatgtttgacggttcacaccttccagttgaagaaaaccttaaattggctaaagaagttgttgaaaaagcacacgctaaaggtatctcagtagaagctgaagttggtactatcggtggtgaagaagatggaatcatcggtaaaggtgaattggctccaatcgaagacgctaaagcaatggttgaaactggtatcgacttcttggcagctggtatcggtaacatccacggtccttacccagtaaactgggaaggtcttgaccttgaccacttgcaaaaattgacagaagctcttccaggattcccaatcgtattgcacggtggatcaggtattcctgatgagcaaatccaagcagctatcaaacttggtgttgccaaagttaacgttaacacagaatgccaaatcgcattcgctaacgcaactcgtaaatttgctcgtgactacgaagcaaacgaagcagaatacgacaagaaaaaactcttcgacccacgtaaattcttggctgacggtgtaaaagctatccaagcatcggttgaagaacgtatcgacgtattcggttcagaaggtaaagcataatctagctgaataatacagataaaacctgcctgtgagggtgggttttttgatttcaagctactcgttttagtatagtaaactgaatctagactagcacaatgctgcttctatagcgttttgaaactagaataggataacataactgctaaaagatttctataaattcatttgattttcctaatcaatttgttcgtatcctatttcactccactataaaatagtcttatcaattgatttgaatgccaaaattccatcgttcctgtcttatttcatttggctataaaaaactctcctgggaaatcccaggagagtatgattacttatttgaacttgaatccttcgtaaataagctctgtttttggattttgtttcttaatctgtttggcaagtgccttcatcatagaaataggaccacacatatagacggttgcatgttcgggcacttctttttgttcaaaattaagatagccgtctttcgtactgtcgattagatggagttcaaaattaggatttttctgagcatagttacggagtaaatctaggtagactgcattttcatctccacggaagctatagtagaagtgaacctgtttatctaaaataggatgttcacggatgtaagagatgaagggggtgatcccaatacctccagcaatccaaacctgattttctcgtccttcttctatgatcatgtgtccgtaagctctgtctagggttactttgctgccggcttgaagattatcatagatattcttggtatggtcgcctgaagttttaacagtaaagtaaagagtttgaccatgacctcctgagatagaaaagggatgcggagcactttcaaagccttcttggaaaatctttagaaaggcaaattgtcctgattgatagttgaaaggtctgctaagatggatttgaatttctctagtatcgtgatttaagcgtttgagatgggtaattttccctagataggggaaggaaatcttttgatatagaaaaatgatataaaaaccagctagtaagcctaaaagggcatagctaccaacaagaaaacttagaagattaaatgtaaggagacgattgcccattatcatgtagatgtgaaagagtcctaaaatataggctaggtaaaccaggcggtgaatccatcgccaagcttcgtattggatgtatttgcctaaataggcgacaaggatgatgctggcaaagatatagatggcaagattgccaaactgagcagctaagcgagagccccacaaaccgcccatactaaagttatgaaagattagtaggatgattgagagaaaggctgtgaatttgtggacggtgtagaccttctccaaactgtgaaaccagctttctagtagtgggagacgagtggctaggataaaagtcagagataggcttgttaaagctagtcctggaatcatgaattggggagaagtgttcatccaagtcaaaagagtcaagataaaactagctatgataaagagtagtcctttgactgatttcatagaaaattccatttcatttagatttcgatttgttgtaaataaatttgttacattttatcatagaaaatgtatggtgtcaaattgaggtctataaatatctactctcatcaaaaaactctccaattgaactggagagtggctgtttatactcaatgaaaatcaaagagcaaactaggaagctagccgcaagttgctcaaaacactgttttgaggttgcagatagagctgacgtggtttgaagagattttcgaagagtgttattctgcagcttgttgccaacgtttggctagcatatgagacaggctagaaattgctaggttaaagctgaagtagatgagggcaatcaggatgtaaagactgaagacctgctctggttcgaaataacggcccatgagaatttggctggctccaaagagttcttgtagggcgataacagagtagaggagactggtatccttaatcacggtaacaaactgagaaatgatggctggtagcattttgcggatggcttgtgggagaatgatgtagtagaggatttgggctgaggtgaagccttgtgacattcctgcttcgtactgtcccttgtctacggcattgagaccgcctcgaataatctcagccaaggctgctgatgtaaagagagtaaaggctgtaatacctgctggtgtggatttcattttgaacaccaaaaagatagtaaaaatccagagaaggttgggaacgttgcgcacaaactcgatataaatactggaaataatgcgtaagacaggatttttgccatttctcgtgacagctagcaccgtaccgatgatagtagagaggatgatggcaatcagagaaatatagagggtcaagccaaatcctttaaagataaagactaggttatctggggttaaaacttctaaaatagattccatagtaacctcctaaagtgaataggcttttttgttggcttgctccatcttgcgaccaaactgggcaacagggaagcatagagcaaagtagagaagagcagcacctaaaaaggctggtatatagtttccgttgagagccgaccaagacttagtcacaaacatcaagtctactccagagatgatagctacagtagaggtgttcttgatgaggttaacaatttggttggtcaatggagggagaatgatgcggaaggcctgaggcaagataatcaagcgcatggcactgatataggtaaaaccttgcgacaaggcggcctccatctgaccactaggaatagactgaatccctgaacgaataacctcagcgatataagcgccgtgatagagtcccacgcagagaacggctgtccaataaattggaatcatgatgatatggtcactgataagaggtaggccataaaaaacaataacaaactgcaccaagaggggagtattttggtaaaattcaacaaagatgcgagctaaaatgcgtaaaattggacgtttactggttgacatggcaccaaagaagatgcccaaaaccatagcgaggataaaggaaccaaccgctagggcaagggtgaagaggaaaccattgaaaaattgtccaaaatcctgaaaataggctgtccaagatgataaatctgtcatggggtgtcctccttaatctgcagtatggctagatggtttgagcttgtaacggtcataaagtttctgcaaactaccatccttgctccatttagtaaccaagttatcaagatagtcgttgagctctgtatttgatttcttggtaacaataccgtagtcagatggcttgaaactatcatctagtagtgctgtccgtttactagtgtagccagatagaatagagcggtcaacggaaaaggtatcgatacgatgagcgtgcagggaagtaatcaattctgggtaggaaccaagttcgacgaatttaaacttcagacctttctttttacccagttcagtaatcaggcgttgggtgatagaaccttgggcgactccgatggttttgccgtttaggtcctcaatctttttgattttggcagatttattgaccaaaaatccagaagcgtctgtgtagtagggactggtaaagttgtagagttttttgcgttcgtccgtgatggtaaaggtcgcgatatccatatcgacctgttcattgtctagaagggggccgcgggtttgtgctgtaaccggcacatagcgaatcttgaccttgagttcatcagctaccatcttggccaagtcggtttcgataccagaataagtaccggtcttgggatctttgtaaccaaaattgggaacgtcttgtttgacaccgacaaccagttcgcctcttttttgaatgtctgcgatacttgtatcagcctggactggtttggcagcagcaaggccgaaaaggctaatcaataatgctgataaaaagaattttttttcataggcgcctccttatttgactttgtcactttcgtggttgataattttgctgaggaattgttgggcacgaggttcgcttggattgtcaaaaaagttatcgacatctgtcgtatctactaaaacttctccgtcggccataaagataatgcggtccgcaacctctcgagcaaagcccatttcgtgggtaacgatgatcatgttcatcccatcatgcgccagtttctgcataactgctagaacatctccgatagtctcaggatcaagagcagatgttggttcatcaaagaggaggagttccggatgcatagcaagaccacgagcgatggcgatccgctgtttttgtccaccagatagcatggcgggataggaatctttcttgtcccacatatttacaaattccagatatttttgggcggttttttcagcttcttttttatcaattcctagaacttcaatgggtgcaagcgttacgttttctaacacagctttgtgtggataaaggttaaaatgttgaaaaaccatgccgacttccttgcgaagaggtaccaaatctttctggctggcaccagcaacttggtgcccattgactaggagacttcctttgtcaacagtctctaaaccattgatcgtacggataagagtggacttcccagagccagaaggtccaagcaggacaacaacttgtcctttttcaaaacggagattgatgttgcggaatgcgtggtagtctccgtaatatttttcgacgtttttaaattctactaaagccatgagagatctctattgtgttatattttataacacggttctacaataaaagaatgttcttgtcaaatcatatctgaaaaaattcactatagtgaaataagaacaggaaaaatcgatcgggacagtcaaatcgatttctaacaatattttagaagtagaggtgtactattctagtttcaatatactataaaatgttataaaaaagcaatctggatagagaaaacgtctaaatcatgttataatgaagcaatagaattcttagaaagagtggatgtctttttgataacacctacttatgaatggcagtttgccctgcaggtagaagatgcggattttacaaagatagccaagaaggctggactgggtcctgaggtggctcggttattgtttgagagagggattcagaaccaagaaagtctgaagaagtttttagaaccttccttggaggacttacatgatgcttatctgctccatgatatggacaaggcagtggagcggattcgtcaggctattgaagaaggggaaaatattcttgtttatggagactatgatgcggatggcatgacttcggcttctattgtgaaggaaagtttggaacaacttggtgctgagtgccgagtttacctgccaaatcgttttaccgatggctatggccctaatgctagtgtttataaatactttatcgagcaagaagggatttccttgattgtgacggtggacaatggggttgctggtcatgaggctattgcattggctcagtctatgggagtagatgtcattgtgacagaccatcattccatgcctgaaaccctgccagatgcttatgctattgtccatcctgaacatccagatgcggattatccttttaaatatttggctggttgtggagttgctttcaagttggcttgtgccctgttagaagaagtgcaagtggaattgcttgatttggtcgctattggaactattgcagatatggtgagtctgacggatgaaaatcgtatcttagttcaatatggtctggaaatgttgggtcatacccagcgcattggtctgcaagaaatgctggacatggctgggattgctgccaacgaagtaacagaagaaacggttggtttccagattgctcctcgtttgaatgccttgggtcgcttggatgatcccaatcctgccattgatttgttgactggatttgatgatgaggaagcgcatgagattgcccttatgattcaccagaaaaacgaagagcgcaaggaaatcgttcagtctatctatgaagaagccaagaccatggtggatcctgagaagaaggttcaggtcttggccaaggaaggctggaatcctggggttctaggaatcgtggctggtcgtttattggaagaattgggacagacagtcattgttcttaatatagaagacggtcgtgccaagggcagtgctcgtagtgtggaagcggtcgatatttttgaagctctggatccccatcgagacctcttcatcgcctttggaggtcatgcaggtgcagcgggtatgacgctggaagttgagcaactctcagatttatctcaggttttggaagattatgttcgtgaaaaaggtgcagatgctggtggcaagaataagttaaacctagatgaagagttggatttggaggcacttagcttggaaacggtcaaaagttttgaacgtttagctccttttggaatggataatcagaaacctattttttatatcaagaattttcaggtcgaaagtgctcgtactatgggggcaggtaatgcccatctaaagctgaaaatttccaagggtgaggcgagttttgaagtggtagcctttggtcaaggcagatgggcgacagagttttctcaaaccaagaatctagagttagcggttaaattgtctgtcaaccaatggaatggccaaactgccctccagttgatgatggtggatgcgcgagtggaaggtgttcaactttttaacattcgtggaaaaaatgcagtcttgccagaaggtgttccagtcttggattttcctggagaactgccaaatcttgcggctagtgaagctgttgtcgtaaaaaacattccagaggatattactcagctgaagaccatttttcaggaacagcatttctctgctgtctatttcaaaaatgatattgacaaggcttattatctgacaggttatgggactagagatcagtttgccaaattgtacaagactatttaccagttcccagagtttgatattcgctacaagctgaaagatttggctgcatatcttaatattcaacaaatcttgctggtcaagatgattcaagtatttgaagaactaggctttgtgacgataaaagatggtgtgatgacagtcaataaagaggcgccaaagcgggagataggagaaagtcaaatttaccaaaatctcaaacaaaccgttaaagaccaagaaatgatggcgctgggtacggtgcaagaaatttatgattttttgatggaaaaagagtagaagttaggaaagagttgggaaatcaactcttttttgaaaacagaccttcattttgaaaatcatcaaaaaaatggtataatggtaggaaaagattcggctgaaagtatcagaacttttagaataagagggtagaattgccctataatcaagataaactaagattttggaggaaaaatgagtaatatcagtttaacaacacttggtggtgtgcgtgagaatggaaaaaatatgtacattgctgaaattggagagtccatttttgttttgaatgtagggttaaaatatcctgaaaatgaacaattaggggtcgatgtggtgattccaaacatggattacctttttgaaaatagcgaccgtattgctggggttttcttgacccacgggcatgcggatgccattggtgctctaccgtatctcttggcagaggctaaagttcctgtatttgggtctgagttgaccattgagttggcaaagctctttgtcaaaggaaatgatgccgttaagaaatttaatgatttccatgtcattgatgagaatacggagattgattttggtgggacagtggtttccttcttccctacgacttactccgttccagagagtctgggaattgtcttgaagacatcggaaggaagcatcgtttatacaggtgacttcaaatttgaccaaacggctagtgaatcttatgcaactgattttgctcgtttggcagagattggtcgtgacggcgtcctggctctcctcagtgattcggccaatgcagacagcaatattcaggtggctagtgaaagtgaagttagggatgaaattacccaaactattgctgactgggaaggtcgtatcatcgttgcagctgtttccagtaatctttctcgtattcagcagatttttgacgctgcggataaaacaggtcgacgtatcgtcttgacaggatttgatattgaaaatatcgtccgcacagcgattcgtcttaagaagttgtctttagccaacgaaattcttttgattaagcctaaagatatgtctcgctttgaagaccatgagttgattattcttgagacaggtcgtatgggtgagcctatcaatggacttcgtaagatgtcgattggtcgccatcgttatgtagaaatcaaggatggggacctagtctatattgctacggctccgtctattgctaaagaagcctttgttgcgcgtgtggaaaatatgatttatcaggcaggtggggttgtcaaattgattacccaaagtttacatgtatcagggcacggaaatgtgcgtgatttgcagctgatgatcaatcttttgcaacctaagtacctcttccctgtccaaggggagtatcgtgagttggatgctcacgctaaggctgccatggcagttgggatgttgccagaacgcatcttcattcctaaaaaggggacgaccatggcttacgagaatggagactttgttccagctggatcggtttcagcaggagatatcttgattgatgggaatgccattggtgatgttggaaatgttgttcttcgtgaccgtaaggtcttgtcagaggatggaattttcatcgtggctattacagtcaaccgtcgtgagaagaaaattgtggctagggctcgtgttcacacgcgtggatttgtttatctcaagaagagtcgcgatattctccgtgaaagttcagaattgattaaccaaacggtagaagagtatcttcaaggagatgactttgactgggcagatctcaaaggtaaggttcgtgacaatctgaccaagtacctctttgatcaaaccaagcgtcgcccagccattttaccagtagtcatggaagcaaaataatcgttgaaataaacagagagaaagtcgagtttcggctttttcttatagaaaaatagaaggagaaaatcatggcagtgatgaaaatcgagtattactcacaagtattggatatggagtggggggtgaatgtcctctaccctgatgccaatcgagtggaagaaccagagtgtgaagatattcccgtcttgtaccttttgcacgggatgtctggaaatcataatagttggcttaagcggaccaatgtagaacgcttgcttcgaggaactaatctcatcgttgttatgcccaataccagcaatggttggtacaccgatacccagtatggttttgactactacacggctctagcagaggaattgccacaggttctgaaacgcttcttccctaatatgacgagcaagcgtgaaaagacctttatcgctggtctttctatgggaggctacggctgcttcaaactggctcttacgacaaatcgtttttctcatgcagctagtttttcaggtgccctcagctttcaaaacttttctcctgaaagtcaaaatctgggaagtccagcctactggagaggtgtttttggagagattagagactggacaactagtccctattctcttgaaagtctggctaaaaaatcggataaaaagaccaaactttgggcgtggtgtggcgaacaggatttcttgtacgaagccaataatctcgcagtgaaaaatctcaaaaaactaggttttgatgtgacctatagccatagcgctggaactcacgagtggtactactgggaaaaacaattggaagtttttttaacaaccctaccaattgatttcaaattagaagagagactgacttagtttgaacttcagcatagggggagtagaactaaaataaaatatgttttcactagacttttcaaacgaaagtagtagaatagtaataaaatactggaggaaagagagtaggaaatgtaccgttatcaaattggcattcccacattagaatatgatcagtttgtcaaagaacatgaattagccaatgtattacaaagtagtgcttgggaggaagttaagtctaattggcaacatgagaagtttggtgtttacagggaagaaaaattactggcgacagctagtattttgattagaactcttccgctaggctataaaatgttttacatcccaagaggacctatattggattatggggataaagaactcttgaattttgccattcagtctattaagtcctatgctcgcagtaagagagcggtttttgtgacttttgacccaagtatttgcctatctcaaagtttaatcaatcaggaaaagacagaatttcctgaaaatctggctattattgatagtttgcaacaaatgggagtaaggtggtcaggaaaaacggaggaaatgggagacaccattcaacctcgtattcaggcgaaaatatacaaggaaaattttgaagaagataaactttccaagtcaacaaaacaggctattcgaacagcacgaaacaaagggcttgagattcaatatggtggactggaactattagattcattttcggagttgatgaaaaaaactgagaagcgaaaagagattcatttgaggaatgaagcctattataaaaaattgttagataattttaaggacaaggcctatatcaccttggccaccttggatgtttctaaacgttcgcaagagttagaagaacagttagcgaaaaatagagccttggaagagacctttactgagtcgactcgaacttcaaaagtagaagcgcagaagaaggaaaaagaacgtttgttagaggaattgaccttcttgcaggaatatatagatgtaggtcaagcgagagttcctttagcggctactttgagtttggaatttggtactacctctgtcaatatatatgctggtatggatgatgattttaaacgttacaatgcaccaattttaacttggtatgaaacggctcgctatgcctttgaacgaggtatgatctggcaaaatttaggtggtgttgaaaactctctcaatggtggactttatcattttaaggaaaaatttaatccaacgattgaagaatacttgggtgaatttacaatgcccactcatcctctctatcctctgttaagacttgctcttgatttccgtaaaacattaagaaaaaaacatagaaagtaagtatatggcactaacaacactcacgaaagaagagtttcagacttattctgatcaggtttcttctcgttcctttatgcaatctgtccagatgggggatttgctagaaaaaagaggggctcgaattgtttatcttgctttgaaacaagaaggagaaattcaagttgcagctctggtttatagcctgcccatgctgggtggtctgcatatggaactcaattcggggccgatttatacccaacaagatgctcttccagttttttatgcagagttaaaagaatatgccaagcaaaatggtgtattagagttgcttgtaaaaccctatgaaacttatcaaacttttgatagccaaggtaatccaatagatgctgagaaaaaaagtattattcaagatttgactgatttaggttatcaatttgatggcttaacaacaggttacccaggtggagaaccagattggttatactataaagatttaactgaattaactgaaaagagtttgcttaaaagttttagcaaaaagggtaaacccttggtgaaaaaggctgaaacctttggcattcggttgaaaaagttaaaacgtgaagaactatcgatttttaagaatataacaaaagaaacctctgaacgtagagaatatagtgataaaagtttagaatattatgagcatttttatgatacttttggagaacaagcggagtttctcatagcaagcttaaatttttcggactatatgagcaaattgcaaggtgaacaaagtaaactagaagaaaacttggacaagttgcgacttgatttgagtaaaaatcctcattctgagaaaaaacaaaatcaactgagagaatattctagtcaatttgaaacgtttgaagttcgaaaagcagaagcgcgagacttgattgaaaaatatggagaagaagatattgttttagctgggagtttatttgtttatatgcctcaggaaacgacttatctctttagtggttcctacactgagtttaataagttctatgcccctgcactgcttcaaaaatatgttatgttggaaagcataaaacgtggaatacctaaatacaacttcctaggcattcaagggatttttgatggaagtgatggtgttttgcgttttaaacagaattttaatggctatattgtacgcaaagcaggtactttccgttaccatccatcgcctttaaaatacaaagctatccagttactcaaaaaaatagtaggacgttaagatgaaaaagtcagtatttagatttcttttagcttcttttagtaaaataattcttatttgctagaaaggtggagagacatgcgctggctttttcgtttgataggggctttcttttcttttgtgtggcgtttgttttggcgtctggtttggatagttgtgctcttatgtgtgcttgctttcggacttctctggtatctgaacggagattttcaaggagcgctaaagcaagcagaacggtcagtaaaaattggtcaacaaagtattgaccaatgggagaaaacagggcaactgcctaagttaagccagacagatagtcaccagcattctgaaggaaggtgggcacaggcctctgctcgtatttacctggatccgcagatggattcacgctttcaagaggcttatttagaagcaatccagaactggaatcaaactggtgcttttaactttgaactcgtgactgagtctagtaaggcggatattacggctacggagatgaacgacggaggcactcctgtggcaggagaggcggaaagtcaaactaatctcttaacagggcaattcttgtccgtaacggtgcggttgaatcattattatttgtccaatccatactatggctactcctatgaacgccttgtccatacggcagaacatgagttaggtcatgcgattggcttggaccatacagatgagaagtctgtcatgcaaccagcaggttccttttatggtatccaggaagaggatgttgcaaacctccgaaaaatatatgagactagtgagtagggtactatctttccctactttttttgctataatggaactatgaacaacttgattaaatcaaaactagagctcttgccgaccagccctggttgctacattcataaggataaaaatggcaccattatctatgtaggaaaggctaaaaatctgcgtaatcgagtacggtcctattttcgtggaagtcatgataccaagacagaggctctggtgtctgaaattgtggattttgaatttattgttacggagtctaatattgaggcacttctcctagaaatcaacctgatcaaggaaaacaagcccaagtacaatatcatgctcaaggatgacaagtcctatcctttcatcaaaatcaccaatgagcgctatccacgcttgattatcactcgtcaggtcaaaaaggacggaggtctttattttggaccctatcccgatgtgggggcagccaatgaaatcaagcggttgctggatcggatattcccttttcgtaagtgtaccaacccgccctctaaggtctgtttttattaccatatcggccagtgtatggcccacaccatctgtaagaaggatgaggcttatttcaagtctatggcccaggaggtgtctgattttctgaaaggtcaggatgacaaaatcatcgatgatctcaagagtaaaatggcagtagcagcacaaagtatggagtttgaacgtgcggcggaataccgtgacctgattcaggctattggaacgcttcgaaccaagcaacgggtcatggcgaaagatttgcaaaatcgcgatgtctttggctactatgtggataagggctggatgtgtgtgcaggttttctttgtccgtcagggtaagctcatcgagcgcgatgtcaatctcttcccctacttcaatgatccagatgaggattttttgacctatgtaggacaattctatcaagaaaaatctcatctagttcccaatgaggtactgattccgcaggatattgacgaagaagctgtcaaggctttggtggattccaagattcttaagcctcaacgtggagagaaaaaacaactggtcaatctagccataaaaaatgctcgtgttagtctagagcagaagttcaatctgctagaaaaatctgtcgaaaagactcaaggagctattgaaaatctagggcgtttgctccaaatcccgaccccagtacgtatcgagtccttcgataactctaatatcatgggaactagccctgtttcggctatggtggtctttgtcaacggtaaaccgagtaagaaggattaccgtaagtacaagataaaaacggttgttggaccagacgactatgccagcatgagagaggtcattcgcagacgctatggtcgagtacagcgtgaggctttgactcctccagatttgattgtgattgatggggggcaaggtcaagtcaatatcgctaagcaggttatccaagaggaactgggcttggatattccaattgctgggctgcaaaagaatgataagcaccaaacccatgaattgctctttggagatccgcttgaggtggtggatttgtctcgcaattctcaggaatttttcctcctccaacgcatccaagatgaggtgcaccgctttgctatcactttccaccgccaactgcgctccaaaaattctttctcatctcaattggatgggattgacggtctgggacctaaacgcaagcagaatcttatgaagcatttcaagtctttgaccaaaatcaaggaagccagtgtggatgagattgtcgaagttggggtacctagagtcgttgcagaggctgtgcaaagaaagttgaacccgcagggagaagccttgcctcaagtagcagaagaaagagtagattaccaaacggaaggaaaccacaatgaaccataaaatcgcaattttatcagatgttcatggcaatgcgacggcgctagaagcagtgattgcagatgctaaaaatcaaggggccagtgaatattggcttctgggagatatttttcttcctggtccaggcgcaaatgacttagtcgccctgctaaaggaccttcctatcacagcaagtgttcgaggcaattgggatgatcgtgtccttgaggctttagatgggcaatatggcttagaagacccacaggaagttcagctcttgcgtatgacacagtatttgatggagcgaatggatcctgcaacgattgtctggctacgaagcttgcctttgctggaaaagaaagaaattgacggattgcgcttttctatctctcataatttacctgacaaaaactatggtggtgacttgctagttgagaatgatacagagaaatttgaccaactgctagatgcggaaacggacgtggcagtttatggtcatgttcacaagcagttgcttcgttatggaagtcaagggcaacaaatcatcaatccagggtcgattggcatgccctattttaattgggaggcgttaaaaaatcaccgttcccagtatgccgtgatagaagttgaagatggggaattactcaatatccaatttcgtaaagttgcttatgattacgaagctgagttagaattggccaagtccaaggggcttccctttatcgaaatgtatgaagaactgcgtcgtgacgataactatcaggggcacaatctggaattattagccagcttaatagaaaagcatgggtatgtagaggatgtgaagaatttttttgattttttgtaagagtttcctaaaatagccaatgcaaactaaaaaagcgatttgctggtccaatcgcttttagtatatcttatactcaatgaaaatcaaagagcaaactaggaagctagccgtaggttgctcaaagcacagctttgaggttgcagataaagctgacgtggtttgaagagattttcgaagagtgttattgtaactgagattgatctgggaggtaagaaccacctagataggtattgctgagtttttcaagggttccgtcttgatagagttctttgagcgctttatcaaattgctctttaaactctttttggtcgcttgagaaaatgatataattgctggggctatctgcagaaggtaaatcaacgactgagaggtctaaaccacggtccttgataatcttttgaacggataccttgtcaaaaactaggaaatcaaactctccgttagcaaggtctaggattcgtttaccaatatcctcaccagaaaaattaattgtagcgggattatcagtgtgtttctgattccagttattgatgaattgagcgttagaagttccggtatcctcttgtgttgttttaccagcgatctggtcaagagaagtcaaaggatttttcttgttgctgacaaggacgaggggattgttggaaattggaagcgagtaaaggtatttttcagcacgctcttttgtgtaactcaagttattggccgcagcctgatagtgaccagaatcaagtcctgggaagatgctctcccaggcggttctttggaattgaatctcgtagtcgctgagtttttcatctactgcctttaaaacttcgatatcaaagcctgtcagattgcccttgtcttcgtagtcaaatggtggcacgtcgccagctgtagcaaggacgattgtcttttgagcgctagtctctttgggtgtagcttgattctcacaggcaaccaaaaatggtaggatagctagtaataggctaaattttttcatactgtctccattcaaatgtaaagtacttgctagtttatcagaaactttcctgataaaccaatatatatcttttatgtctgtgatagaaaaacttaatcatgaaaaatccctgcaagctctttcaaattatggtagaatggaagcagtagaattagaaaaggaaatcgattatgaaatttcttgaattaaataaaaaacgtcatgcgactaagcattttactgataagcttgttgatcccaaagatgtgcgtacggctatcgaaattgcaaccttggcgccaagcgcccacaacagccagccttggaaatttgtggtggtacgtgagaaaaatgctgaactggcaaagttagcttatggttccaattttgaacaggtatcatcagcgcctgtaaccattgccttgtttacagatacggacttagccaaacgtgctcgtaagattgcccgtgttggtggtgctaataacttttctgaagagcaacttcaatattttatgaaaaatctgccagctgagtttgcccgttacagtgagcaacaagtcagcgactacctagctctcaatgcaggtttggttgccatgaacttggttcttgcattgacagaccaaggaattggttctaacattattcttggttttgacaaatcaaaagttaatgaagttttggaaatcgaagaccgtttccgcccagaactcttgatcacagtgggttatacagacgaaaaattggaaccaagctaccgcttgccagtagatgaaatcatcgagaaaagatagaaagaagaaaaaatgacagcaattgattttacagcagaagtagaaaaacgcaaagaagacctcttggctgacttgtttagccttttggaaatcaattcagaacgtgatgacagcaaggctgatgcccagcatccatttgggcctggtccagtaaaagccttggagaaattccttgaaatcgcagaccgcgatggctacccaactaagaatgttgataactatgcaggacattttgagtttggtgatggagaagaagttctcggaatctttgcccatatggatgtggtgcctgctggtagcggttgggacacagacccttacacaccaactatcaaagatggtcgcctttatgcgcgcggggcttcggacgataagggtcctacaacagcttgttactatggtttgaaaatcatcaaagaattgggtcttccaacttctaagaaagttcgcttcatcgttggaacagacgaagaatcaggctgggcagacatggactactactttgagcacgtaggacttgccaaaccagatttcggtttctcaccagatgctgaatttccaatcatcaatggtgaaaaaggaaatatcacggaatacctccactttgcaggagaaaatacaggtgttgcccgtcttcacagctttacaggtggtttacgtgaaaatatggtaccagaatcagcaacagcagtcgtttcaggtgacttggctgacttgcaagctaaactagatgcctttgttgcagaacacaaacttagaggagaactccaagaagaagctggcaaatacaaggtgacgatcattggtaaatcagcccacggtgctatgcctgcttcaggtgtcaatggcgcaacttaccttgccctcttcctcagccagtttggctttgctggtccagccaaagactaccttgacatcgcaggtaaaattctcttgaacgatcatgagggtgaaaatcttaagattgctcatgtggatgaaaagatgggtgctctttctatgaatgccggcgtcttccacttcgatgaaacaagtgctgataataccattgccctcaacatccgctatccaaaaggaacaagtccagaacaaatcaagtcaatccttgaaaacttgccagttgtttctgttagcctgtctgaacacggtcacacgcctcactatgtgccaatggaagatccacttgtgcaaaccttgttgaatatctatgaaaaacaaactggctttaaaggtcatgaacaagtcatcggtggtggaacctttggtcgcttgctagaacgcggagttgcctacggtgctatgttcccagactcgattgataccatgcaccaagccaatgaatttatcgccttggatgatcttttccgagcagcagcaatttatgccgaagctatttacgaattgatcaaataaaacgatagaagtctgagatcttatgcttggacttctttttggagggaaagtagatgtctcaaatcgaaagaatcaaacaggctatcatggcggattcgcagaatgccagctatacagagcgtggcattgagcctctctttgcagcgccaaaaactgctcgcatcaatatcatcggtcaggctccgggacttaaaactcaagaagcaggcctttactggaaagataaaagtggtgaccgcttgcgggactggctaggtgtggatgaagataccttttacaattcaggttattttgctgttttgcctatggatttctactttccaggacatggcaagtcgggtgatcttccgcctcgtacaggttttgcagaaaaatggcatccgcaggtcttacaggaattgcctgatattcagttaaccctcttgattgggcaatatgcccaagcctactatttacaggagaaaatcagtgggaaggtaacggagagggtgaaacactataaagactatctgccagcctattttccgctagttcacccatcaccacgaaatcaaatctggatggccaaaaatccttggtttgaggcagaagtagtgccagatttgaaaaaaagaattaaaaccattttatagtcaatgaaaatcaaagagcaaactaggaagctagtcgtaggctgctcaaagtacagctttgaagttgcagataaaactgacgaagtcggtaacatacgcacggtaaggcgacgctgacgtggtttgaagagattttcgaagagtattagaagaaaaagaatgaaagaaatagcctttgacgcattttaccagctttaccaaaacgaccagctttctttagtggatgtgagagaagtggatgagtttgcagctcttcatttagaaggtgcccacaacctaccgcttagtcaattggctgatagttatgattaattggacaaagatcgcttgcattatattatttgcaaatctggaatgagatcggcgcgtgcttgccaattcctattagaacaaggttataatgttatcaatgtccagggtggcatgttagcctttgaagaactttaaaattttgcatttctcctacttggtgtggactgggtaggagagttttatttttagataattcttatttttaagaaaattgaaaacatttaatatttgcctcgtgatgcttttttcagactcctaatcgtggtatactaggtcagtattttataaatatgaaggagatttttatggctaaaaaaggtaccctaacaggtttgctcctgtttggaatattttttggtgcggggaacttgatttttccgccttctctaggtgctctatctggagaacattttcttcctgccatcgcaggttttgtcttttcaggcgttggtatcgccgtcttgacccttattattggaacgctaaatcctaaaggatatatctacgagatttcaacgaagatagcgccttggtttgcgactctttacctctcagttctttacttgtcaatcggtccattctttgctaccccacgtactgctacaacagcttacgaagtagggattagcccccttttgtcggatgcaaataaaggacttggcttgattgtatttacggttctgtattttgcggcagcctatttgatttcgcttaatccatcaaaaatcttagaccgcattggacgtattttaacgccagtctttgcaattttgattgttatcttggtcgttctgggagctatcaaatatggtggaacaagtcctcaagctgcttcactgcttatcaagcttctgcctttggtacaggtttcctagaaggttacaataccttggacgcccttgcctcagtggcctttagcgtaatcgcagttcaaaccttgaaacaacttggattttcaagtaagaaagaatacatttcaactatttgggttgttggtatcgttgttgcccttgccttcagcgctctttacatcggtttaggttttcttggaaatcatttcccagtaccagctgaagcgatgaagggtggaacaccaggtgtttacatcttgtcacaagccactcaagaaatctttggctcaacagctcaactcttccttgcagctatggttaccgtaacctgcttcacaacgactgttggtttgattgtgtcaacagctgagttctttaatgagcgcttcccacaaatcagctacaaggtttatgcgacagcctttaccttgattggatttgctattgccaatttgggtcttgatgcgattatcaagtactcaattccagtactggttatcttgtacccaatcacgattgctatcgttatgattgtcattgtcaacaaatttgttgccctttcaaaaccaggtatgcagttgacaattgctgtggttacagttattgccattgcaagcgtactaggaagctcgttaaggttgagtttcttgcaaatcttgttagcgttcttccttttgccaaggcatctctcccatggttggtgccagccattgttggaatcttgctctcattggttctaccaaacaagcaagaaagcgatgtttttgaaatggaataatcacttaaatcacttttgtagccaagtctacaggagtgattttctttttttatccgatgataaatgtgttataataggtagcgaaagaggtgaagaaatgaatcaaacagtagaatatatcaaagaactgacagccattgcgtcgccaacaggctttactcgtgagattgcggactatttagtcaagactctagaaggttttggttaccagccggttcgcacatccaagggcggtgtcaatgtaactattaaaggtcaaaatgatgagcaacatcgctatgtgactgcccatgtagatacgcttggtgctattgtccgtgctgtcaaaccagacggccgtctcaaaatggaccgtatcggtggctttccttggaacatgattgaaggagaaaactgtaccattcatgtggctagcacaggtgaaaaagtatcaggaaccatcctcatccaccaaacttcttgccatgtctataaggatgcaggaactgcagaacgcacgcaagacaatatggaagtgcgtttggacgccaaagtaactagtgaaaaagaaactcgtgctcttggcattgaggtcggtgattttatcagttttgacccacgaactgtcgtgacagagacaggttttatcaagtctcgccatttggatgacaaggtcagtgcggcgattttgctcaatctccttcgcatttataaggaagagaagattgaattgcccgtaacaactcattttgctttttcagtctttgaagaagtgggacacggtgcaaactctaacattcctgctcaggtagtagaatatctggctgtggatatgggagccatgggagatgaccagcaaacagacgaatatacagtgtctatctgtgtcaaggatgcttctggaccttatcactatgacttccgtcaacatttggtggctttggcgaaagagcaagatattccatttaagctggatatctatccattttatggttcggacgcttcagcggctatgtctgcaggggcagaagtcaaacacgcccttctcggtgctggtatagagtctagccattcctatgagcgtacccatattgactcggtgatcgcaacagaacgaatggtcgatgcttatcttaagagcacgttggtggactaatatgtgccttatttgtcagagaattgacctcatcaagaaggaagaaaatccttactttgtcaaagagttggaaacaggctatcttgtggttggagaccaccagtattttgaaggctatagtctctttctagccaaggagcatgtcagcgaattgcaccatttgaaaaaggagacaagactccgttttctagaagaaatgagtttagtccaagaggcagttgccaaggcctttgctgctgagaaaatgaatatcgaactgctaggaaatggcgatgctcatcttcattggcatctgtttccacgacggacaggtgatatgaatggtcatggtctcaagggtcgtggaccagtctggtgggttccctttgaagaaatgacagcagaaacctgccaagcaaaaccggatgagattaaaagattagtcaaacgtttatcgtcagaagtagataaactattagaaataaaggagtagaaatgaagaaaagatacctagtcttgacagctttgctagccttgagtctagcagcttgttcacaagaaaaaacaaaaaatgaagatggagaaactaagacagaacagacagccaaagctgatggaacagtcggtagtaagtctcaaggagctgcccagaagaaagcagaagtggtcaataaaggtgattactacagcattcaagggaaatacgatgaaatcatcgtagccaacaaacactatccattgtctaaagactataatccaggggaaaatccaacagccaaggcagagttggtcaaactcatcaaagcgatgcaagaggcaggtttccctattagtgatcattacagtggttttagaagttatgaaactcagaccaagctctatcaagattatgtcaaccaagatggaaaggcagcagctgaccgttactctgcccgtcctggctatagcgaacaccagacaggcttggcctttgatgtgattgggactgatggtgatttggtgacagaagaaaaagcagcccaatggctcttggatcatgcagctgattatggctttgttgtccgttatctcaaaggcaaggaaaaggaaacaggctatatggctgaagaatggcacctgcgttatgtaggaaaagaagctaaagaaattgctgcaagtggtctcagtttggaagaatactatggctttgaaggcggagactacgtcgattaatactcttcgaaaatctcttcaaaccacgtcagcgtcgccttacctactgactgcgtcggttctattcacaacctcaaaacagtgttttgagctgacttcgtcagttttatctgcaacctcaaagctgtactttgagcagcctgcggctagcttcctagtttgctctttgattttcattgagtacaaaaagtaaacttttctcttgcaattccagataaatagtgtataatggatgggtatgtgaaaaacatacttgtgggaggtaaaaatctctaattaccgccaaaaccacaaaggaggatttaaaaatggctaaaaaagtcgaaaaacttgtaaaattgcaaatccctgctggtaaagctacaccagctccaccggttggacctgctcttggtcaagctggtatcaacatcatgggattcacaaaagagttcaacgctcgtacagctgaccaagctggtatgatcattccagttgttatctcagtttacgaagataaatcatttactttcgttacgaaaacaccaccagctgctgttcttttgaaaaaagctgcaggtgttgaaaaaggatcaggtacacctaataaaactaaagttgctacagttactcgtgcacaagtacaagaaattgcagaaactaagatgccagatttgaacgcagcaaacgtagagtctgcaatgcgtatgatcgaaggtactgctcgttctatgggattcactgttgttgactaatcaataacacagtagaaaatctcacagcagtctattagttgcttttcatactaggcaagtgactgaggcttgtacttgggtacagcaagggagcttaaggccgtagaagagaaaaatagtagactgaaaacccgcaagacttcatcatttcgagaagtgacgtgggagatgaaaatcgattgaaccacttacaaggagaatagaaaatggctaaaaaaagcaaacaacttcgtgctgctcttgagaaaatcgacagcacaaaagcatacagtgtagaagaagctgtagcacttgcaaaagaaactaactttgcaaaatttgatgcaactgtagaagttgcttacaacttgaacatcgacgttaaaaaagctgaccaacaaatccgtggagcaatggtattgccaaacggtactggtaaaacttcacgtgttcttgttttcgcacgtggtgcaaaagctgaagaagcaaaagctgctggtgcagactttgttggtgaagatgaccttgttgctaaaatcaacgacggttggttggacttcgacgtagttatcgctacacctgatatgatggctcttgttggacgtcttggacgtgtccttggaccacgtaacttgatgccaaaccctaaaactggtactgtaacaatggatgttgctaaagcagttgaagagtctaaaggtggtaaaatcacttaccgtgctgaccgtgcaggtaacgttcaagcaatcatcggtaaagtatcatttgaagctgaaaaattggttgaaaactttaaagctttcaacgaaacaatccaaaaagcaaaaccagctacagctaaaggaacttacgtaacaaacttgactatcacaactactcaaggtgttggtatcaaagttgacgtaaactcactttaatcagtagttaaagtaatgtaaaaaagttgaagacgctatgtctcaactttttttgatgtacgacgggcatgttgtatagtagatgtgtactattctagtttcaatctactatagtagctcagaagtcggtacttaaacgtgctatatcaaaaccagtccttgaaaaacgtggactggtttcgtgtttggattattaccttgaacgacatgcgttaaaagttagttgaaccgccgtatgccgaacggcacgtacggtggtgtgagaggggctagagattatcccctactcgatttcgaaatctagtggaatgaatctggaatagtccatcgagctttctaatactcttcgaaaatctcttcaaaccacgtcaacgtcgccttgccgtgcgtatggttactgacttcgtcagttctatccacaacctcaaaacagtgttttgagctgactacgtcagttccatctacaacctcaaaacagtgttttgagcaacctgcggctagtttcctagtttgctctttggttttcattgagtataacacattgttagaagttggtttaaatttcctaatcagtttgttcacatttaccttcgatatattatatcccatagttaaggttggtcatacagatgattatagtcatggagccgtaaaacttagtgtttctttagttgacaaagatgccatgaaaaaaatatttgtaactgtaataggatattttgaaataaatatagatgaaaatatcaccgatattctatacgtaaatggtactgctattctttatctttatttacgttcaattgtttcaatagtttcggcaattgatagcagtgaagcaatgttgctacctatcattaatgttttagagttactagataaatctcaaccttttgaagaagaataatttattagctcactaaattgagggtaaggaaaagtaaaagcagtaagaaaaatgtcttgcattatacagcaaccttttgggaatgagtggatggattgaataaaatttgattaagagtggatgatttatctgtagattattattggacagttagtcttgaagtagtctaagaattaggttataatcagtagaagccttgctaataatgaggaggttagtttatgtatagtagactgaatctaaaatagtacgaaacaattgctaaaacatttatagaaattaattttactttcccaatcgatttgttctcatcttatttcaatccgctatatattatggtatcgaatcttcatcagaatgataaaattaatcaattgatatctgattacaaacagaatatgaaagctttttatatcactattgaaaaatttatacgagatgatgaaagccttaagtgttattttataaaggttatttcaagtcgttccaaggtaacaagtctagatcagattgaagctgataaaacgatacaaagaaaatattcaagtgagctaaaaaaatttattggattttataatgagattatttgtgaggaaaatagtttcctacatgtacgaaagaggtggtcgagttggtttaggtagtcgatgcgtgagttgataattctcagggtatggacttctttttcatgaatgaggtaaaagagcaggtattgtttagagacaatcattctgagcatattttctggatagagggagtatccgattttatgatcaaagttaataccgccctctggtgagaagatgagtaggttggtaatttaaactattaaacagaatttttgattaaaagtattatttcatgagagaaatcctaatttcacaatccataggcaaacgcttgcatttcgttttttattggactataataggttggtataaagccttctgtagtaataaaatgtagaaggtgtagaaagtaaggatttagaatatttgtagttaaaaacacaatgttgctattccttacgatagggagatagatatggcaatgatagaagtggaacatcttcagaaaaattttgtgaagactgttaaggaaccgggcttgaagggggctttgcgctcctttattcatcctgaaaagcagacctttgaagcggtcaaggatttgacctttgaggttccaaaagggcagattttaggatttatcggggcaaatggtgctgggaagtcgacaaccattaaaatgctgacaggaattttgaaaccaacatctggtttttgtcggattaacggcaagattccccaggacaatcggcaagattatgtcaaagatattggcgtagtctttggacaacgcacccagctatggtgggatttggctctgcaagagacctacactgtcttaaaagagatttatgatgtgccagactcgctctttcataagcgtatggactttttgaatgaagtcttggatttgaaggactttatcaaggatcccgtgcggactctttcactgggacaacggatgcgggcggatattgcggcctccttgctccacaatcccaaggttctttttttagatgagccgaccattggtttggacgtttcggttaaggataatattcgtcgggcaattactcagatcaatcaagaggaagaaactaccattcttttgaccactcacgatttgagtgatattgagcaactttgtgatcggattttcatgattgacaaggggcaagagatttttgatggaacggtgagccaactcaaggagacctttggtaagatgaagactctctcttttgaactgctaccaggtcaaagtcatctcgtctctcactatgacggtctgtctgatatgaccattgatagacaaggaaacagcctcaacattgaatttgatagttctcgctaccagtcagctgacattatcaagcaaaccctgtctgattttgaaatccgcgatttgaagatggtggatacggatattgaggatattatccgtcgcttctaccgaaaggagctctaggatgatcaaattgtggagacgttataaaccctttatcaatgcaggggttcaggagttgattacttaccgagtcaactttattctctatcggattggcgatgtcatgggggcttttgtggccttttatctctggaaggctgtctttgattcttcgcaagagtctttgattcagggcttcagtatggcggatatcaccctctacatcatcatgagttttgtgaccaatcttctgactagatccgattcgtcctttatgattggggaggaggtcaaggatggctccattatcatgcgtttgttgcgaccagtgcattttgcggcctcctatcttttcaccgagcttggttccaagtggttgatttttatcagcgttggccttccatttttaagtgtcattgtcttgatgaaaatcatatcgggtcaaggtattgtagaggtgctaggattaactgtcatttatctttttagcttaacgctcgcctatctgattaactttttctttaatatttgctttggattttcagcctttgtgtttaaaaatctttggggttccaacctacttaagacttccatagtggcttttatgtcggggagtttgattcccttggcattttttccaaaggttgtttcagatattctctcctttttgcctttttcatccttgatttatactccagttatgatcattgttggaaaatacgatgccagtcagattcttcaggcactccttttgcagttcttctggctcttagtgatggtgggattgtctcagttaatttggaaacgggtccagtcctttatcaccattcaaggaggttagtatgaaaaaatatcaacgaatgcatctgatttttatcagacaatacatcaaacaaatcatggaatataaggtagattttgtggttggtgtcttgggagtctttctgactcaaggcttgaatctcttgtttctcaatgtcatctttcaacatattccattcctagaaggctggacctttcaagagatagctttcatttatggattttccttgattcccaagggaatggaccatctcttttttgacaatctctgggcactagggcaacgcctagtccgaaaaggggagtttgacaagtatctgactcgtcccatcaatcctctctttcacatcctagttgaaacctttcagattgatgccttgggtgaactcttagtcggtggtattttattgggaacaacagtgaccagcattgtttggactcttccaaaattcctgcttttcctagtttgtattccttttgcgaccttgatttatacttctcttaaaatcgcaacagccagtatcgccttttggactaagcagtcaggcgccatgatttacatcttctatatgttcaatgactttgctaagtatccgatttctatttacaattctcttcttcgttggttgattagctttatcgtgcctttcgcctttacagcctactatccagctagctatttcttacaggaaaaggatgtgttctttaacgtaggaggtttgatgttgatttctctggttttctttgttatttcccttaaactttgggataagggcttagattcctacgaaagtgcgggttcgtaaaagctaaagtaagactaaaatcaagaaagaaacttatgatgtttgtaattgaagaagtcaaggatgaaaatcaaaaaaaggcagttgtcgctgaggttttgaaggatttgccagaatggtttggaatcccagaaagcacacaagcctatatagaaggaaccacgacactgcaagtttggaccgcctatcaggagagtgatttgactagatttgtaagcttatcctattcgagtgaagattgtgcagagattgattgtctcggcgtaaaaaagcttatcaaggtagaaaaattgggagccaattgcttgctactttagagagtgaagctcgtaaaaaagttggttatctgcaggtcaaaacagtggcagaaggttctaataaagattatgatcgaacaaatgacttttatcgaggtcttggctttaaaaagttagagatttttcctcaactatggaatccgcaaaatccttgtcagattttgattaaaaagcttgaataatattacttgacatctattctcagagtgctatactgtaagtgtaatcgccgatttagcttagttggtagagcaaggcactcgtaaagcctaggttataggtagataaacgactgaggatttgaaaaaatagataggtagaagataaccgttaagccttactcttagcggttatttatattgtttaatagcgctaatattttatcaattatgcctgttttcgtgtttctggtagttgttcaagtttattgctactatttttgatggtatgaatgtgcttataatgtatcccggttaacgaaagttttggacttatactcttcgaaaatctcttcaaaccacgtcaacgtcgccttgccgtgcgtatggttactgacttcgtcagttctatccacaacctcaaaacagtgttttgagctgactacgtcagttccatctacaacctcaaaacactgttttgagcaatctgcggctagtttcctagtttgctctttgattttcattgagtactaatcttattttttaatgtgtgctaaaaaataaattaactaatgttaatttttttgacttaaatttttttaaatgatatactgtttttatagagagataacaattatatataaatgtactactctatttcctagataatacttagtaaaactttttataacaaaggctagcaaagttaaagtttattatctattggaagttatataaatatgtaaggaattaaaatgaaaaaaagtacagtattgtcattaaccacagctgcagttattttagcagcctatgcccctaatgaggtagtcttagcagacacatctagctctgaagatgctttaaacatctctgataaagaaaaagtagcagaaaataaagagaaacatgaaaatatccatagtgctatggaaacttcacaggattttaaagagaagaaaacagcagtcattaaggaaaaagaagttgttagtaaaaatcctgtgatagacaataacactagcaatgaagaagcaaaaatcaaagaagaaaattccaataaatcccaaggagattatacggactcatttgtgaataaaaacacagaaaatcccaaaaaagaagataaagttgtctatattgctgaatttaaagataaagaatctggagaaaaagcaatcaaggaactatccagtcttaagaatacaaaagttttatatacttatgatagaatttttaacggtagtgccatagaaacaactccagataacttggacaaaattaaacaaatagaaggtatttcatcggttgaaagggcacaaaaagtccaacccatgatgaatcatgccagaaaggaaattggagttgaggaagctattgattacctaaagtctatcaatgctccgtttgggaaaaattttgatggtagaggtatggtcatttcaaatatcgatactggaacagattatagacataaggctatgagaatcgatgatgatgccaaagcctcaatgagatttaaaaaagaagacttaaaaggcactgataaaaattattggttgagtgataaaatccctcatgcgttcaattattataatggtggcaaaatcactgtagaaaaatatgatgatggaagggattattttgacccacatgggatgcatattgcagggattcttgctggaaatgatactgaacaagacatcaaaaactttaacggcatagatggaattgcacctaatgcacaaattttctcttacaaaatgtattctgacgcaggatctgggtttgcgggtgatgaaacaatgtttcatgctattgaagattctatcaaacacaacgttgatgttgtttcggtatcatctggttttacaggaacaggtcttgtaggtgagaaatattggcaagctattcgggcattaagaaaagcaggcattccaatggttgtcgctacgggtaactatgcgacttctgcttcaagttcttcatgggatttagtagcaaataatcatctgaaaatgaccgacactggaaatgtaacacgaactgcagcacatgaagatgcgatagcggtcgcttctgctaaaaatcaaacagttgagtttgataaagttaacataggtggagaaagttttaaatacagaaatataggggcctttttcgataagagtaaaatcacaacaaatgaagatggaacaaaagctcctagtaaattaaaatttgtatatataggcaaggggcaagaccaagatttgataggtttggatcttaggggcaaaattgcagtaatggatagaatttatacaaaggatttaaaaaatgcttttaaaaaagctatggataagggtgcacgcgccattatggttgtaaatactgtaaattactacaatagagataattggacagagcttccagctatgggatatgaagcggatgaaggtactaaaagtcaagtgttttcaatttcaggagatgatggtgtaaagctatggaacatgattaatcctgataaaaaaactgaagtcaaaagaaataataaagaagattttaaagataaattggagcaatactatccaattgatatggaaagttttaattccaacaaaccgaatgtaggtgacgaaaaagagattgactttaagtttgcacctgacacagacaaagaactctataaagaagatatcatcgttccagcaggatctacatcttgggggccaagaatagatttacttttaaaacccgatgtttcagcacctggtaaaaatattaaatccacgcttaatgttattaatggcaaatcaacttatggctatatgtcaggaactagtatggcgactccaatcgtggcagcttctactgttttgattagaccgaaattaaaggaaatgcttgaaagacctgtattgaaaaatcttaagggagatgacaaaatagatcttacaagtcttacaaaaattgccctacaaaatactgcgcgacctatgatggatgcaacttcttggaaagaaaaaagtcaatactttgcatcacctagacaacagggagcaggcctaattaatgtggccaatgctttgagaaatgaagttgtagcaactttcaaaaacactgattctaaaggtttggtaaactcatatggttccatttctcttaaagaaataaaaggtgataaaaaatactttacaatcaagcttcacaatacatcaaacagacctttgacttttaaagtttcagcatcagcgataactacagattctctaactgacagattaaaacttgatgaaacatataaagatgaaaaatctccagatggtaagcaaattgttccagaaattcacccagaaaaagtcaaaggagcaaatatcacatttgagcatgatactttcactataggcgcaaattctagctttgatttgaatgcggttataaatgttggagaggccaaaaacaaaaataaatttgtagaatcatttattcattttgagtcagtggaagaaatggaagctctaaactccaacgggaagaaaataaacttccaaccttctttgtcgatgcctctaatgggatttgctgggaattggaaccacgaaccaatccttgataaatgggcttgggaagaagggtcaagatcaaaaacactgggaggttatgatgatgatggtaaaccgaaaattccaggaaccttaaataagggaattggtggagaacatggtatagataaatttaatccagcaggagttatacaaaatagaaaagataaaaatacaacatccctggatcaaaatccagaattatttgctttcaataacgaagggatcaacgctccatcatcaagtggttctaagattgctaacatttatcctttagattcaaatggaaatcctcaagatgctcaacttgaaagaggattaacaccttctccacttgtattaagaagtgcagaagaaggattgatttcaatagtaaatacaaataaagagggagaaaatcaaagagacttaaaagtcatttcgagagaacactttattagaggaattttaaattctaaaagcaatgatgcaaagggaatcaaatcatctaaactaaaagtttggggtgacttgaagtgggatggactcatctataatcctagaggtagagaagaaaatgcaccagaaagtaaggataatcaagatcctgctactaagataagaggtcaatttgaaccgattgcggaaggtcaatatttctataaatttaaatatagattaactaaagattacccatggcaggtttcctatattcctgtaaaaattgataacaccgcccctaagattgtttcggttgatttttcaaatcctgaaaaaattaagttgattacaaaggatacttatcataaggtaaaagatcagtataagaatgaaacgctatttgcgagagatcaaaaagaacatcctgaaaaatttgacgagattgcgaacgaagtttggtatgctggcgccgctcttgttaatgaagatggagaggttgaaaaaaatcttgaagtaacttacgcaggtgagggtcaaggaagaaatagaaaacttgataaagacggaaataccatttatgaaattaaaggtgcgggagatttaaggggaaaaatcattgaagtcattgcattagatggttctagcaatttcacaaagattcatagaattaaatttgctaatcaggctgatgaaaaggggatgatttcctattatctagtagatcctgatcaagattcatctaaatatcaaaagcttggcgagattgcagaatctaaatttaaaaatttaggaaatggaaaagagggtagtctaaaaaaagatacaactggggtagaacatcatcatcaagaaaatgaagagtctattaaagaaaaatctagttttactattgatagaaatatttcaacaattagagactttgaaaataaagacttaaagaaactcattaaaaagaaatttagagaagttgatgattttacaagtgaaactggtaagagaatggaggaatacgattataaatacgatgataaaggaaatataatagcctacgatgatgggactgatctagaatatgaaactgagaaacttgacgaaatcaaatcaaaaatttatggtgttctaagtccgtctaaagatggacactttgaaattcttggaaagataagtaatgtttctaaaaatgccaaggtatattatgggaataactataaatctatagaaatcaaagcgaccaagtatgatttccactcaaaaacgatgacatttgatctatacgctaatattaatgatattgtggatggattagcttttgcaggagatatgagattatttgttaaagataatgatcagaaaaaagctgaaattaaaattagaatgcctgaaaaaattaaggaaactaaatcagaatatccctatgtatcaagttatgggaatgtcatagaattaggggaaggagatctttcaaaaaacaaaccagacaatttaactaaaatggaatctggtaaaatctattctgattcagaaaaacaacaatatctgttaaaggataatatcattctaagaaaaggctatgcactaaaagtgactacctataatcctggaaaaacggatatgttagaaggaaatggagtctatagcaaggaagatatagcaaaaatacaaaaggccaatcctaatctaagagccctttcagaaacaacaatttatgctgatagtagaaatgttgaagatggaagaagtacccaatctgtattaatgtcggctttggacggctttaacattataaggtatcaagtgtttacatttaaaatgaacgataaaggggaagctatcgataaagacggaaatcttgtgacagattcttctaaacttgtattatttggtaaggatgataaagaatacactggagaggataagttcaatgtagaagctataaaagaagatggctccatgttatttattgataccaaaccagtaaacctttcaatggataagaactactttaatccatctaaatctaataaaatttatgtacgaaatccagaattttatttaagaggtaagatttctgataagggtggttttaactgggaattgagagttaatgaatcggttgtagataattatttaatctacggagatttacacattgataacactagagattttaatattaagctgaatgttaaagacggtgacatcatggactggggaatgaaagactataaagcaaacggatttccagataaggtaacagatatggatggaaatgtttatcttcaaactggctatagcgatttgaatgctaaagcagttggagtccactatcagtttttatatgataatgttaaacccgaagtaaacattgatcctaagggaaatactagtatcgaatatgctgatggaaaatctgtagtctttaacatcaatgataaaagaaataatggattcgatggtgagattcaagaacaacatatttatataaatggaaaagaatatacatcatttaatgatattaaacaaataatagacaagacactaaacattaagattgttgtaaaagattttgcaagaaatacaaccgtaaaagaattcattttaaataaagatacgggagaggtaagtgaattaaaacctcatagggtaactgtgaccattcaaaatggaaaagaaatgagttcaacgatagtgtcggaagaagattttattttacctgtttataagggtgaattagaaaaaggataccaatttgatggttgggaaatttctggtttcgaaggtaaaaaagacgctggctatgttattaatctatcaaaagatacctttataaaacctgtattcaagaaaatagaggagaaaaaggaggaagaaaataaacctacttttgatgtatcgaaaaagaaagataacccacaagtaaaccatagtcaattaaatgaaagtcacagaaaagaggatttacaaagagaagagcattcacaaaaatctgattcaactaaggatgttacagctacagttcttgataaaaacaatatcagtagtaaatcaactactaacaatcctaataagttgccaaaaactggaacagcaagcggagcccagacactattagctgccggaataatgtttatagtaggaatttttcttggattgaagaaaaaaaatcaagattaagataaaagctatagaaaaaaatggtttatgtactgagattagatagtgaggtgatgacatagttttgtgaaaatagccatttataactcaattatttagtttactttactttactagtgatactatttggagttattaatggacttagtttatataactaatgaattgattgaaagggttagtattgacaatattggtcatattgactagaaaatagagtctatcaaaatttaaaggctaatagaggtgatgagacaatttcggctctttgtcaactgtagtgggttgaagtcagctaagctcgagaaaggacaaattttgtcctttcttttttgatattcagagcgataaaaatccgttttttgaagttttcaaagtttcgaaaaccaaaggcattgcgcttgataagtttgatgagattattggtcgcttccagtttggcattagaatagtgtagttgaagggcattgacaatcttctctttatctttgaggaaggttttagaggatgaacttgattcagattgtcctcaatgagtccgaaaaatttgtcaggctccttattctgaaagtgaaaaagcaagagttgatagagattatagtggtgtttcaagtcttctgaatagctcaaaagtttatctatagtagattgaaactagaatagtacacctctgcttctaaaacattgttagaaatcgatttgactgtcctgaatgatttgtcctgttattatttcattttactataaatccacgtttacgaatctctttccacacttgttcaatggggttcatctctggtgtgtatggaggaataaatgcaaaaccaatattagtcggaatctttaaggtacttgatttatgccatatagcattgtccataacgagtaaaagataatcatctggataagcttgtgaaagctcctattcctaaagcccctttataacctcttgcgagagagactattgactcagcccttacttcatgcggatgaaacttcttatcgggttctagagagtcatagccatctgacctactattggacctttttgtctgggaaagttgagaatcaagcaatcacgctgtaccatcatgatcagagtcggagtggttcggtagtacaagaattcctaggagattattctggctatgttcattgtgatatgttgcggcagtaacttaggactttagtcctctagttctgcctatgcgatagcagtccaaggtttaggagcaaggcgacgctaagcttggtaaactgcgaaccgctagaagcttatcgtcaactggaagaagctgaacttgttggatgttgggcgcatgtgagaaggaaattttttgaagcgacccccaagcaagcagataaatcatccttaggagctaaaggtttagcttattgtgatcagttattttccttggaaatagactgggaggctttgccagctgatgaacgactacagaaacgtcaagaacatctccagcccctaatggaagacttctttgcttggtgccgccgtcagtcagttttagcaggttcaaaactaggaagggcaattgaatacagcctcaagtatgaagaaacctttaagactattttgaaagacggacatctggtcctttccaataatctagctgaacgcgccattaaatcattggttatgggacggagtaaaagagtccagtggactcttttagcctgagctcagtttaaaaaagcgagggtggttattttctcaaagttttgaaggagctaaagcaagagctattgttatgagcttgttggaaacagctaaacgtcatcaattatagtgcgttgaatctataacagtacgcatcgactgctaaaacatttctataaatcaattttcctttcctaatcgatttgttcatatcttatttcaatccattataaatagcgagaaatatctatcctatcttctagaatgtcttccaaacgaggaaactctcgtaaacaaagaggttttagaggtttatttaccatggactaaagttgtacaagaaaagtgcaaataagaaatctccagattaggaactatccgtgagttcactaatctggagatttttcaatagacttcgttattgggcggttacgatatgatcactgacttcgtcagtcttatctacaacctcaaaacagtgttttgagcaacctgcgactagcttcctagtttactctttgattttcattgaatattagaacagaaaaaatgcttggagtatttgtttgtgtgtttatttttatataacaaactataaacaaaataaaaatataaaaaaagagacaaaaaagaacagaaagtaattgacaacggtttcatatagtgttatacttatggcataaagttaatggaaagaagggaaaaacttatggtattagattatttctttgacaaaaaccttgtgttttgcttagaagcggatagtcaagaacaactctttgatcaggttgcaactttattggaagaacgagaaattgtcactccaacttatcgtgaagccttgatcacgcgtgaaaagtcatttccaactggtttagatatggaatttctaggaaaggacttgccaaatgtagcgattcctcacacagatattgttcataatctagctgagaaagtggtggttgttcgattagaaaaaccaataacttttcacaatatgatagctcctgataaggaagtagaagtatccctactcttctttatcattaataattcaagttcaagtcaaacgaacattcttgctcagttaatggacttcttcacaggaaatggtcatcttgaagacctatcaaaaatttctgaaccagaagccctttatacttacattgctgaagcaaccgcttaatcttgtctattaaaaaataaaatcggaggaaatctaaatgattaaaattcttgctgcctgcggtgcaggtgttaactcaagtcaccaaattaaaagtgctctagaagaagaactttcaaaccgtggttatgatgttcactgtgatgcagtcatggtgaaagatgtaaacgaagaccttatgaaaggttacgatatctttacaccaatcgctgcaacagaccttggttttgaaccaggtatcccagttatcgaagctgggccaatcttattccgtatcccagcaatgagcgctccagtatttgacaatattgaagcagctattaaagaacacggattaagctaattctaatttgttaacattcatataacatcaaaaagggaggaactgttatggatgcaatctttgacctaatcggaaaggttttcaatcccatcttagaaatgggtggacctgtcatcatgttaatcattttgacagtattggctttactttttggagtgaaattctccaaagcgcttgaaggtggtatcaaacttgccatcgctcttacaggtatcggtgctatcatcggtatgctaaacactgctttctcagcatcactagcaaaattcgttgaaaacactggtatccaattgagtattaccgacgttggttgggcaccacttgctacaatcacttggggttctgcttggacactatacttcttgctcatcatgttgattgtcaacatagtgatgctagctatgaagaaaacagatacacttgatgtcgatatctttgatatctggcacttgtctatcacaggtctcttgattaaatggtatgctgataacaatggtgtgagtcaaggggtttcactctttattgctacagcagctatcgtccttgtcggtgtgttgaaaattatcaactctgacttgatgaaacctacatttgatgaccttcttaacgccccaagttcatcaccaatgacatcaactcacatgaactacatgatgaacccagttatcatggttttggataagatttttgaaaaattcttcccaggccttgataaatatgactttgatgctgctaaattgaacaagaaaatcggtttctggggatctaaattcttcatcggtttcatccttggtatcgttatcggtattatgggaactccacatccaattgcaggtgttgcagatgcagataaatggcgtcttgttatcaaaggatggttgtctcttggtttgactgccggtgtatctttggaactcttctcacttatcggttcatggttcatcgcagccgtagaaccactatcacaaggtattacaaacgttgctactaaacgtcttcaaggacgtaaattcaatatcggtcttgactggccattcatcgctggtcgtgctgaaatctgggcttgtgccaacgtacttgcaccaatcatgttgattgaagcagtgcttctttcaaaagttggaaatggtatcttgccacttgcaggtatcatcgctatgggtgttactccagctctcttggttgtaactcgtggtaaattgctccgtatgattatcttcggaacactcttgttgccactcttccttctttcaggtacacttattgcaccatttgcaacagaacttgctaaaggtgtaggtgccttcccagaaggtgtgagccaaactcaattgattactcactctactcttgaaggaccaatcgaaaaacttcttggttggacaattggtaacactacaactggtgatatcaaagcaatccttggtgcagtagtcttccttgtattctatatcggtatctttgcttggtacagaaaacaaatgatcaaacgtaacgaagagtacgcagcaaaagcaaaataatgcgctcctataaaatataaactcaatgaaaatcaaagagcaaactaggaagctagccgcaggttgctcaaaacacagttttgaggttgtagataagactgacgaagtcagctcaaaacatggttttgaggttgtagatgaaactgacgaagtcagctcaaaacatggttttgaggttgtagatgaaactgacgaagtcagctcaaaacatggttttgaggttgtagatgaaactgacgaagtcagtaatcatatctacggcaaggcgacactgacgaagtttgaattggattttcgcagagtgtaaattgttgaaactaggttgtcataccatgtataccacttgggctttggtagtagctaactgcactaaatataatataaggagggttttatggggaaaggccattggaatcggaaaagagtttatagcattcgtaagtttgctgtgggagcttgctcagtaatgattgggacttgtgcagttttattaggaggaaatatagctggagaatctgtagtttatgcggatgaaacacttattactcatactgctgagaaacctaaagaggaaaaaatgatagtagaagaaaaggctgataaagctttggaaactaaaaatatagttgaaaggacagaacaaagtgaacctagttcaactgaggctattgcatctgagaagaaagaagatgaagccgtaactccaaaagaggaaaaagtgtctgctaaaccggaagaaaaagctccaaggatagaatcacaagcttcaaatcaagaaaaaccgctcaaggaagatgctaaagctgtaacaaatgaagaagtgaatcaaatgattgaagacaggaaagtggattttaatcaaaattggtactttaaactcaatgcaaattctaaggaagccattaaacctgatgcagacgtatctacgtggaaaaaattagatttaccgtatgactggagtatctttaacgatttcgatcatgaatctcctgcacaaaatgaaggtggacagctcaacggtggggaagcttggtatcgcaagactttcaaactagatgaaaaagacctcaagaaaaatgttcgccttacttttgatggcgtctacatggattctcaagtttatgtcaatggtcagttagtggggcattatccaaatggttataaccagttctcatatgatatcaccaaataccttcaaaaagatggtcgtgagaatgtgattgctgtccatgcagtcaacaaacagccaagtagccgttggtattcaggaagtggtatctatcgtgatgtgactttacaagtgacagataaggtgcatgttgagaaaaatgggacaactattttaacaccaaaacttgaagaacaacaacatggcaaggttgaaactcatgtgaccagcaaaatcgtcaatacggacgacaaagaccatgaacttgtagccgaatatcaaatcgttgaacgaggtggtcatgctgtaacaggcttagttcgtacagcgagtcgtaccttaaaagcacatgaatcaacaagcctagatgcgattttagaagttgaaagaccaaaactctggactgttttaaatgacaaacctgccttgtacgaattgattacgcgtgtttaccgtgacggtcaattggttgatgctaagaaggatttgtttggttaccgttactatcactggactccaaatgaaggtttctctttgaatggtgaacgtattaaattccatggagtatccttgcaccacgaccatggggcgcttggagcagaagaaaactataaagcagaatatcgccgtctcaaacaaatgaaggagatgggagttaactccatccgtacaacccacaaccctgctagtgagcaaaccttgcaaatcgcagcagaactaggtttactcgttcaggaagaggcctttgatacgtggtatggtggcaagaaaccttatgactatggacgtttctttgaaaaagatgccactcacccagaagctcgaaaaggtgaaaaatggtctgattttgacctacgtaccatggtcgaaagaggcaaaaacaaccctgctatcttcatgtggtcaattggtaatgaaataggtgaagctaatggtgatgcccactctttagcaactgttaaacgtttggttaaggttatcaaggatgttgataagactcgctatgttaccatgggagcagataaattccgtttcggtaatggtagcggagggcatgagaaaattgctgatgaactcgatgctgttggatttaactattctgaagataattacaaagcccttagagctaagcatccaaaatggttgatttatggatcagaaacatcttcagctacccgtacacgtggaagttactatcgccctgaacgtgaattgaaacatagcaatggacctgagcgtaattatgaacagtcagattatggaaatgatcgtgtgggttgggggaaaacagcaaccgcttcatggacttttgaccgtgacaacgctggctatgctggacagtttatctggacaggtacggactatattggtgaacctacaccatggcacaaccaaaatcaaactcctgttaagagctcttactttggtatcgtagatacagccggcattccaaaacatgacttctatctctaccaaagccaatgggtttctgttaagaagaaaccgatggtacaccttcttcctcactggaactgggaaaacaaagaattagcatccaaagtagctgactcagaaggtaagattccagttcgtgcttattcgaatgcttctagtgtagaattgttcttgaatggaaaatctcttggtcttaagactttcaataaaaaacaaaccagcgatgggcggacttaccaagaaggtgcaaatgctaatgaactttatcttgaatggaaagttgcctatcaaccaggtaccttggaagcaattgctcgtgatgaatctggcaaggaaattgctcgagataagattacgactgctggtaagccagcggcagttcgtcttattaaggaagaccatgcgattgcagcagatggaaaagacttgacttacatctactatgaaattgttgacagccaggggaatgtggttccaactgctaataatctggttcgcttccaattgcatggccaaggtcaactggtcggtgtagataacggagaacaagccagccgtgaacgctataaggcgcaagcagatggttcttggattcgtaaagcatttaatggtaaaggtgttgccattgtcaaatcaactgaacaagcagggaaattcaccctgactgcccactctgatctcttgaaatcgaaccaagtcactgtctttactggtaagaaagaaggacaagagaagactgttttggggacagaagtgccaaaagtacagaccattattggagaggcacctgaaatgcctaccactgttccgtttgtatacagtgatggtagccgtgcagaacgtcctgtaacctggtcttcagtagatgtgagcaagcctggtattgtaacggtgaaaggtatggctgacggacgagaagtagaagctcgtgtagaagtgattgctcttaaatcagagctaccagttgtgaaacgtattgctccaaatactgacttgaattctgtagacaaatctgtttcctatgttttgattgatggaagtgttgaagagtatgaagtggacaagtgggagattgccgaagaagataaagctaagttagcaattccaggttctcgtattcaagcgaccggttatttagaaggtcaaccaattcatgcaacccttgtggtagaagaaggcaatcctgcggcacctgcagtaccaactgtaacggttggtggtgaggcagtaacaggtcttactagtcaaaaaccaatgcaataccgcactcttgcttatggagctaagttgccagaagtcacagcaagtgctaaaaatgcagctgttacagttcttcaagcaagcgcagcaaacggcatgcgtgcgagcatctttattcagcctaaagatggtggccctcttcaaacctatgcaattcaattccttgaagaagcgccaaaaattgctcacttgagcttgcaagtggaaaaagctgacagtctcaaagaagaccaaactgtcaaattgtcggttcgagctcactatcaagatggaacgcaagctgtattaccagctgataaagtaaccttctctacaagtggtgaaggggaagtcgcaattcgtaaaggaatgcttgagttgcataagccaggagcagtcactctgaacgctgaatatgagggagctaaagaccaagttgaactcactatccaagccaatactgagaagaagattgcgcaatccatccgtcctgtaaatgtagtgacagatttgcatcaggaaccaagtcttccagcaacagtaacagttgagtatgacaaaggtttccctaaaactcataaagtcacttggcaagctattccgaaagaaaaactagactcctatcaaacatttgaagtactaggtaaagttgaaggaattgaccttgaagcgcgtgcaaaagtctctgtagaaggtatcgtttcagttgaagaagtcagtgtgacaactccaatcgcagaagcaccacaattaccagaaagtgttcggacatatgattcaaatggtcacgtttcatcagctaaggttgcatgggatgcgattcgtccagagcaatacgctaaggaaggtgtctttacagttaatggtcgcttagaaggtacgcaattaacaactaaacttcatgttcgcgtatctgctcaaactgagcaaggtgcaaacatttctgaccaatggaccggttcagaattgccacttgcctttgcttcagactcaaatccaagcgacccagtttcaaatgttaatgacaagctcatttcctacaataaccaaccagccaatcgttggacaaactggaatcgtactaatccagaagcttcagtcggtgttctgtttggagattcaggtatcttgagcaaacgctccgttgataatctaagtgtcggattccatgaagaccatggagttggtgtaccgaagtcttatgtgattgagtattatgttggtaagactgtcccaacagctcctaaaaaccctagttttgttggtaatgaggaccatgtctttaatgattctgccaactggaaaccagttactaatctaaaagcccctgctcaactcaaggctggagaaatgaaccactttagctttgataaagttgaaacctatgctgttcgtattcgcatggttaaagcagataacaagcgtggaacgtctatcacagaggtacaaatctttgcgaaacaagttgcggcagccaagcaaggacaaacaagaatccaagttgacggcaaagacttagcaaacttcaaccctgatttgacagactactaccttgagtctgtagatggaaaagttccggcagtcacagcaagtgttagcaacaatggtctcgctaccgtcgttccaagcgttcgtgaaggtgagccagttcgtgtcatcgcgaaagctgaaaatggcgacatcttaggagaataccgtctgcacttcactaaggataagagcttactttctcataaaccagttgctgcggttaaacaagctcgcttgctacaagtaggtcaagcacttgaattgccgactaaggttccagtttacttcacaggtaaagacggctacgaaacaaaagacctgacagttgaatgggaagaagttccagcggaaaatctgacaaaagcaggtcaatttactgttcgaggccgtgtccttggtagtaaccttgttgctgagatcactgtacgagtgacagacaaacttggtgagactctttcagataaccctaactatgatgaaaacagtaaccaggcctttgcttcagcaaccaatgatattgacaaaaactctcatgaccgcgttgactatctcaatgacggagatcattcagaaaatcgtcgttggacaaactggtcaccaacaccatcttctaatccagaagtatcagcgggtgtgattttccgtgaaaatggtaagattgtagaacggactgttacacaaggaaaagttcagttctttgcagatagtggtacggatgcaccatctaaactcgttttagaacgctatgtcggtccagagtttgaagtgccaacctactattcaaactaccaagcctacgacgcagaccatccattcaacaatccagaaaattgggaagctgttccttatcgtgcggataaagacattgcagctggtgatgaaatcaacgtaacatttaaagctatcaaagccaaagctatgagatggcgtatggagcgtaaagcagataagagcggtgttgcgatgattgagatgaccttccttgcaccaagtgaattgcctcaagaaagcactcaatcaaagattcttgtagatggaaaagaacttgctgatttcgctgaaaatcgtcaagactatcaaattacctataaaggtcaacggccaaaagtctcagttgaagaaaacaatcaagtagcttcaactgtggtagatagtggagaagatagctttccagtacttgttcgcctcgtttcagaaagtggaaaacaagtcaaggaataccgtatccacttgactaaggaaaaaccagtttctgagaagacagttgctgctgtacaagaagatcttccaaaaatcgaatttgttgaaaaagatttggcatacaagacagttgagaaaaaagattcaacactgtatctaggtgaaactcgtgtagaacaagaaggaaaagttggaaaagaacgtatctttacagcgattaatcctgatggaagtaaggaagaaaaactccgtgaagtggtagaagttccgacagaccgcatcgtcttggttggaaccaaaccagtagctcaagaagctaaaaaaccacaagtgtcagaaaaagcagatacaaaaccaattgattcaagtgaagctagtcaaactaataaagcccagttaccaagtacaggtagtgcggcaagccaagcagcagtagcagcaggtttaactcttctaggtttgagtgcaggattagtagttactaaaggtaaaaaagaagactagaaattttgataccttctttatcattaaagaccaaagaaaaactcttgtcctaaatagaagataaagagcctgagacaaaatagttctcaaccacaaaaaagctagatatttccaattgtggaactctagctttttaattttgagtcattctcttattgtatagtagattgaaactagaatagtacacttttacttctaaaacattgttagaaatcgatttgattgtccttatcgatttgtcctgttcttatttcattttactatattttaggaggttattggccataagtaccaatcccatgtcaattctcacttgacgcttccctctcagattacatctcttgtaacccaaagaagcctttatctgcccaaagacaggttccacatcaatcttgcgttgagcgaaaatctgtctaccttggggagataaaagcgcctgacattctttagctttcaagttttgatagcgttcgttcatatacagtcccttttgaggggctgattcaggttcgtcggcgtagtaaaccttgatttcttgttgaaagtctgtctgtgttttctgatatttggtatggtgaaaacgataataccagccatcaggatgtgtgtagctatcctccttgtcattatagtgccaattcgctaagtttttagctgactctttataccctctcttttgtttcttatcaaacatggcatatttaatcagaaggggagtgatttcttcttgaaaatagacctgtatctgttcttgaagtttggcggagaatttctctgtcgttttcttccacacaaaactatacttgttggcattggcttcaatcttagttctgtcaataaacaaacaatctaaggtcactaactcttccatttttcaatttttcgaccagagaaaatcccttgtgaataggcaaatagaagagtagatacaagcattttagggtgataagacgggcgatcaaaggcatgataggaggtgtagaagtgacgttcctccaaggtattcaccactttttcaatagtaaaaacgagatgatcttgtggtaagaaggaactgatttctagtggtaaagttgtttgatttgtgttatagtgaatatgcatgggatagcctttctaaatggtttattgggcaattctattttaccaagactatcgtaaccatccaaaaaagcaacggcaaatccgttgcctttttggatataagagactattgtcccagactcttttctttgtataaaattgtatagtgttattgtctatactattttgtagagaaagcaaaaatccctagaaaatgcttagggattcgactatttcattaagaacaattcaacaatcatttctatatacatgataagggttaataagaatcctgcacgccagaagaatttgataaatttagggtagtaaaagctgcgttttttcaaaaggaagaaaaagacgagaataatggctaggatcgagagggctagccccagtctagggaggaaattatgggtaaaggttttagctgtaatcaagtaatactcaaataccaagactggaaaagccaaatccgcaaagtttcgtcctagtttttttaatctaaaaagtttggttaggataatgcagacgactaaggtcagtatcaataataaaatagatgctaatttcattaaaatcatacccatattgtatcataaaaaaaggctaatggaaacgagaaacagaggaatttataggaaagtcaggcttttgagattgtgggtgatttttgttataatgaaagtcatgaaatcttataataccttgaatgattattatcgaaaactctttggagaaaagacttttaaagtccctattgatgcgggatttgattgtcccaatcgtgatgggactgtggctcatgggggctgtactttttgtacggtttctggttctggagatgccattgtggcaccggatgcgcctatccgtgagcaattttataaggaaattgactttatgcaccgcaagtggccggatgttcggaagtatctggtttattttcaaaattttaccaacacccatgaaaaggtggaagttattcgagagcgttatgaacaggctatcaatgagccaggtgtggtaggaatcaatattggaacgcgcccagactgtttaccagacgaaaccatcgaatatttggctgagttatcggagtgcatgcatgtgacggttgaattgggcttgcaaactacttatgaagcaacctctgacctgattaaccgtgcgcattcttatgaattgtaggtggaaacggtcaagcgtttgagaaagtatccaaaaattgagattgtttcccatttgatcaatggtttgcctggtgaaacccatgagatgatggttgaaaatgtccgccgttgtgtcacggataacgatattcaagggattaaactgcatttgctccatcttatgacaaatactcgtatgcaacgagattaccatgaggggcgtttacaattgatgagtcaggacgaatatgtcagggtcatctgtgaccaactggaaattattcccaaacatatcgtcatccatcgaattacaggagatgcgcctagggatatgctgcttggtcctatgtggagcctcaataaatgggaagtcctcaacagcattgagatggagatgcgacgtcgtggaagtgttcaaggatgcaaggctgtaaaacaggagtttgaaaatgaaaagaccacttgagatggcacatgattttttggctgaggtcgtgacaaaagaggatgtcgtagtggatgcgactatgggaaatggtcatgacacgctttttttagccaagctagccaagcaagtctatgcctttgatattcagaagcaagccttggaaaagacccaagagcgtttgcatcaggctgacttgacaaatgcccagttaatcttgcaaggccatgagacactggaccagtttgtgataaaagctaaggcagggatttttaatctgggctatttgccggcagctgataagtctgtcatcacccgaccgcagacaacgattgaggcattagaaaagctatgtggcttacttgtcaaaggtggacgaattgctattatgatttactatggtcatgaaggaggcgatctcgagagagatgctgtcttggattttgtgatccagttgaaccaacaagagtacacagctgccatttaccgaactttaaaccaagtcaacaacccgccgtttttagtgatgattgaaaaattagagagatacagacatggataaacaatacttacacgaaaagctggatgccatgcgccagaattttgttgaatcaacccaccacgaacgagcgatgggcgtgctagaccaagcgcatatgagcaaaaaaatgcttaaaatcaagaaaaaattagttgctcttgaaatggaacggtgccagagaaaaattgagcacaaagactgttccaagattgaccaaaaaatcaaagagcagaaggagatatttgaatcctgttgtaaaaaagattaaggaggacgtgcgtggaattactgatttacctcatcctatttttactggttttgattgtctcaagtacaaccaataagctcctgccctttttgcctctccctttggtgcaaattcttttgggaattgtgattggtctctttttacccaatactgactttcaccttaatacggagttgtttttggcactggttatcggacccttgcttttccgagaggctgaagaagcagatgttacggctattttaaaacactggcgaatcattgtttatctcatatttccagtgatttttatctcgaccctgagtttgggtggcttggcccatcttctttggttcagccttcccttggcagcttgcttggctgttggggcagcccttggtcctacggacttggtggcctttgcctctctttcggagcgttttagctttcctaagcgcgtgtccaatattcttaagggcgaaggactcttgaatgatgcttctggtttggtggcttttcaggtagctttgacagcttggacaactggagctttttctctggggcaagctagcagttcgctcatcttttcaatcctaggcggttttttaattggatttttaacagccatgaccaaccgcttcctccataccttcttgctaagtgtgcgcgcaacggatattgccagtgaacttttattagaattgagtttgcctctagtgaccttctttctggcagaagaagttcatgtttcaggtattattgccgtcgtagttgctggaattttaaaggcaagtcgcttcaagaaaatcacgctcctcgaagcccaagtggatacggtgaccgagacggtctggcatacagtgacctttatgctcaacggttctgtctttgtgattttagggatggagttggaaatgatagcagaacctatcttgaccaatccaatctataatcctctacttttattgctatctcttatcgcccttacctttgtcctttttgtcattcgttttattatgatctatggctattatgcctatagaacccgacgcctcaagaaaaagctaaataagtatatgaaggacatgtttctcttgaccttttcaggtgttaagggaacggtgtcgattgctacgattctcttgataccaagtaattagaacaggagtatcctcttttgcttttccttgttgcaggtgtgacgcttgttagctttttaacaggtctcttggtcttgcctcatctttctgatgaagaggaagaaagcaaggattatcttatgcatatcgccattttgaatgaagtaacgctagagttggaaaaagagttggaagacaccagaaataaacttcccctctatgcggctattgacaattatcatggacgtattgaaaatctcattttaagccaagaaaaccaggatgatcaagaagactgggctgctttgaaactcttgattcttagtattgaaagtgatggtttggaacaggcctatgaagaggggaacattagcaatcgtgcttaccgagtttaccaacgttatctgaaaaatatagaacaaggaatcaatcgtaaacttgcctcaagactgacctattattttcttgtttccttgaggattttacgttttctccttcatgaagtttttactctcggaaagaccttccgtagctggaagaacaaggagcaaagccgtctccgtgctcttgattatgaccaaattgcagagctctatcttgccaatacagagatgattattgaaagtttggaaaacctgaagggagtctacagacgctctttgattagttttatgcaggagtctcgtcttcgagaaacagctattatcagcagtggtgcctttgtcgaacgggttatcaatcgtgtcaaacccaacaatatcgatgaaatgctgagaggctattatctggagcgcaagttgattttcgaatacgaagaaaaacgattgattacgactaagtatgccaagaaattacgacaaaatgtaaataacttagagaactattccttgaaggaagctgccaataccctaccgtatgatatggtggaattggtaagaagaaattagttaatactcttcgaaaatctcttcaaaccacgtcagcgtcgccttaccgtatgtatgtgactgacttcgtcagtcttatctacaacctcaaaacagtgttttgagcagcttgcggctagctttctagtttgctctttgattttcattgagtataagattataagtgaaggagtatgacatgaaaaagtggtggaaagagctgatagacaaacctttattaaaagcttttttgcattattatcaagcatcagatagtgagttgaccagtgtcgcagtagcctactattggttgatttcgattttccccctgcttttggtggtggtcaatatcctcccctattttcagattcctgtgggagaatttttgggctttatgaaagacgtcctgcccccaagcctctatgaaggtgtggaaaaaatagccagagaagtcttgacgcaaccttcaacaggtttattgagtttttctgttttatcggcgttatggagtttttcaaaatctatgaatttcttgcaaaaagcttttaacaaggcttatggcgtcgaaaagagtcgtggacttatttcccatcagatgctaagtctcctagtcagttttggcttgcagctcctctttgcgtttgccttgtttttgatcttatttggtcagatgattttggctttacttgctcattattggacaaaagatggcattatctatcaggctttacaagggttggcaggtcctctgatttacgccctcctctttgctatcttggtcatgctttattattttcttcccaatctatctaacaggaaaattagctataccctaccaggcagtgcctttgttctcttagtgattttaggtttactaactctgttctctagttatctcaattactatgtccatcatttggtggatgtccgaattttaggttccgttcttcttgttgttatgatgttttggtttatcttgattgctaaaattgttatcctaggcgcggtgatcaatgccagtatgcagagtttgaaagatccggtctttaaaaaagactaactatttatccattacaaaagcgcatagtatcaaggctttatagaatcttgatactatgcgcttttgtgctttgacagttttttgtatagtttttgtccaagatttctaaatcatctgattaaattcctattttcccctatcattgtccctgttttttcgaaaatggaaggagtataataaatctatcaataaaatgataggaggaactttatgggtcatattttcttttttctaagtgtctttttggcagggattctatccttcttttctccttgtatcttacctttgttaccggtctatacaggagtgttactagatgataaggatggtgctcaggcttctagcggcaaattttcaatctcagttactagtttattacgaactctggcctttatagcaggaatttcctttatatttattttgttgggctatggagctggttttttaggcgatttgctttatgcttcttggttccaatatcttactggggcaattattatccttcttggtttgcaccaaatggagattctacactttaaggggctttataaggaaaagaggctacaactgcaaggacaggggcaaaatggtaagggctatagtcaggcatttttattgggcttgacctttagttttgcttggacgccttgcgtggggccggttctggggtctgttttggccttggcggcttcaggtggttcaggagcttggcagggagctggtctcatgttggtgtatacgctgggcttggcgctaccattcttgcttctagctctgacctctagttatgttttgaaacatttccgaaaacttcatccctatctcggaatcctcaaaaaagtgggtggttttctcattattgtgatgggcttcttggttctgtttggaaatgcttcaattttaagtcaattatttgaataaaatggaaaggaatatcaatatgaaaaaatggcaaacatgtgttcttggagcaggttcgctcctttgtttgacggcttgttcaggcaagtccgtgactagtgaacaccaaacgaaagatgaaatgaagacggagcagacagctagtaaaacaagcgcagctaaagggaaagaggtggctgattttgaattgatgggagtagatggcaagacctaccgtttatctgattacaagggcaagaaagtctatctcaaattctgggcttcttggtgttccatctgtctggctagtcttccagatacggatgagattgctaaagaagctggtgatgactatgtggtcttgacagtagtgtcaccaggacataagggagagcaatctgaagcggactttaagaattggtataagggattggattataaaaatctcccagtcctagttgacccatcaggcaaacttttggaaacttatggtgtccgttcttacccaacccaagcctttatagacaaagaaggcaagctggtcaaaacacatccaggattcatggaaaaagatgcaattttgcaaactttgaaggaattagcctaggaggcgtcttatgaatgataagttaaaaatcttcttgttgctaggagtattttttctagccataaccggtttctatgttctattgatacgaaatgcagggcagacagatgcctcgcaaattgaaaaggcggcagttagccaaggaggaaaagcagtgaaaaaaacagaaattagtaaagacgcagacttgcacgaaatttatctagctggaggttgtttctggggagtggaggaatatttctcacgtgttcccggggtgacggatgccgtttcaggctatgcaaatggtagaggagaaacaaccaagtacgaattgattaaccaaacaggtcatgcagaaaccgtccatgtcacctatgatgccaagcaaatttctctcaaggaaatcctgcttcactatttccgcattatcaatccaaccagcaaaaataaacaaggaaatgatgtggggacccagtaccgtactggtgtttattacacagatgacaaggatttggaagtgattaaccaagtctttgatgaggtggctaagaaatacgatcaacctctagcagttgaaaaggaaaacttgaagaattttgtggtggctgaggattaccatcaagactatctcaagaaaaatccaaatggctactgccatatcaatgttaatcaggcggcctatcctgtcattgatgccagcaaatatccaaaaccaagtgatgaggaattgaaaaagaccctgtcacctgaggagtatgcagttacccaggaaaatcaaacagaacgagctttctcaaaccgttactgggataaatttgaatccggtatctatgtggatatagcaactggggaacctctcttttcatcaaaagacaaatttgagtctggttgtggctggcctagttttacccaacccatcagtccagatgttgtcacctacaaggaagataagtcctacaatatgacgcgtatggaagtgcggagccgagtaggagattctcaccttgggcatgtctttacggatggtccacaggacaagggcggcttacgttactgtatcaatagcctctctatccgctttattcccaaagaccaaatggaagaaaaaggctacgcttatttactagattatgttgattaatactcttcgaaaatctcttcaaaccacgtcagcgtcgccttaccgtatgtagggttactgacttcgtcagttttatctacaacctcaaagctatactttgagctgacttcgtcagttttatttacaacctcaaagcggtactttgagaaacctgtggctatcttcctagtttactttttgatttttattgagtataagaggtctttcctaagcagttagaggagaattttgctatactgatactagtaagtggtaaaggagcagagcatgacctacacaatcttaatcgtagaagatgaatatctggtaagacaaggtttgactaaactggtcaatgtagcagcctacgatatggaaatcatcggtcaggctgaaaatggaaggcaggcttgggaattgatccaaaagcaggtgccagatatcattttaaccgatatcaacatgcctcatctaaatggcatccagttggccagtctggtacgagaaacctatcctcaggttcatttggtctttttaacaggttacgatgattttgattatgccttgtctgctgtcaaactaggtgtggacgactacctgctcaaacccttttctcgtcaggatattgaggaaatgttggggaaaatcaaacaaaaactagacaaggaagagaaagaagagcagttacaagatttattgactaataggtttgaaggaaacatggcccagaaaatccagtctcatctggctgatagccaatttagtttaaagtctttagccagtgacttaggttttagtccgacctatctgagttccttgattaagaaagagttgggcttgccttttcaggattatctggtgagagaacgtgttaaacaagccaagctcttgcttttaactacagatctgaagatttatgagatcgcagagaaggttggttttgaagatatgaactattttacccaacgttttaagcagattgcaggtgtgacacctcgtcagtttaagaagggagaagaccgatgaagcgttcttctcttttagttagaatggttatttccatctttctggtctttctcattctcctagctctggttggaactttctactatcaatcaagttcttcagccattgaggccaccattgagggcaacagccaaacgaccatcagccagactagccactttattcagtcttatatcaaaaaactagaaaccacctcgactggtttgacccagcagacggatgttctggcctatgctgagaatcccagtcaagacaaggtcgagggaatccgagatttgtttttgaccatcttgaagtcagataaggacttgaaaactgttgtgctggtgaccaaatctggtcaggtcatttctacagatgacagtgtgcagatgaaaacttcctctgatatgatggctgaggattggtaccaaaaggccattcatcagggagctatgcctgttttgactccagctcgtaaatcagatagtcagtgggtcatttctgtcactcaagaacttgttgatgcaaagggagccaatcttggtgtgcttcgtttggatatttcttatgaaactctggaagcctatctcaatcaactccagttggggcagcagggctttgccttcattatcaatgaaaaccatgaatttgtctaccatcctcaacacacagtttatagttcgtctagcaaaatggaggctatgaaaccctacatcgatacaggtcagggttatactcctggtcacaaatcctacgtcagtcaagagaagattgcaggaactgattggacggtgcttggcgtgtcatcattggaaaagttagaccaggttcggagtcagctcttgtggaccttgcttggggccagtgtcacatctcttcttgtctgtctctgcttagtgtggttcagtcttaaacgctggattgctcctttgaaggatttgagagaaaccatgttggaaattgcttctggtgctcaaaatcttcgtgccaaggaagttggtgcctatgaactgagagaagtaactcgccaatttaatgctatgttggatcagattgatcagttgatggtagctattcgtagccaggaagaaacgacccgtcagtaccaacttcaagccctttcgagccagattaatccacatttcctctataacactttggacaccatcatctggatggctgaatttcatgatagtcagcgagtggtgcaggtgaccaagtccttggcaacctatttccgcttggcgctcaatcaaggcaaggacttgatttgtctctctgacgaaatcaatcatgtccgccagtatctctttatccagaaacaacgctatggagataagctggaatacgaaattaatgaaaatgttgcctttgataatttagtcttacccaagctggtcctacaaccccttgtagaaaatgctctttaccatggcattaaggaaaaggaaggtcagggccatattaaactttctgtccagaaacaggattcgggattggtcatccgtattgaggatgatggcgttggcttccaagatgctggtgatagtagtcaaagtcaactcaaacgtgggggagttggtcttcaaaatgtcgatcaacggctcaaacttcattttggagccaattaccatatgaagattgattctagaccccaaaaagggacgaaagttgaaatatatataaatagaatagaaactagctaactcccagtcaattctgggagttttatgcgtaattgggcaaactttctaggttgtctatcttgctaaaaacaagaaaaaacggtatgatagaagagtgacaacagaggtaacagagatgaacgagacacagattcaaagagaaacacgtcaggtagtggaagatgttttagaaaagaccaatttgaagcagggggccctttttgttttaggtctatcttctagtgaggtgctaggtggtcatattgggaaagaatccagtcaagagattggtgagctgatagtggagactatcttggatattctaggtagtagaggtatccatttagcagttcaaggttgtgagcatgtcaatcgggctctcgttgttgaacgtcaggtggcagagcagtttggtctggaaattgtcagtgtccatcctactcttcatgcaggaggttcggggcagttggcagcctttaagtttatgcaggatccagttgaggttgaatttatcaaggctcatgctggattggatatcggagacactgcaattggcatgcatgtcaagcatgttcaggttccgattcgccctattttgagagagattggtcatgcccatgtaacggcactggctagtcgtccaaaattaatcggaggtgcgcgtgcgcactatccgcaagatgctattaggaagttttgagaatgaataaaggagataaaagtgtttaaaaaagaccgtttttcaattcgtaagattaagggagttgtaggctctgtatttcttggaagccttttgatggctccttctgtagtggacgcagccacctatcactatgtaaataaagagattatttcacaagaagctaaagatttaattcagacaggaaagcctgacaggaatgaagttgtatatggtttggtgtatcaaaaagatcagttgcctcaaacagggacagaagcatctgttttgacagcttttggtttgctgactgttgggagcttgcttttaatctacaagagaaagaaaattgctagcgtctttctagttggagctatgggattggtagttcttcctagtgcaggggctgtagacccagttgcgaccctagcgctggctagtcgagagggtgttgttgaaatggagggctatcgctatgttggttatctatcaggtgacatcctcaaaacgcttggcttggacactgttttagaagaaacctcagcaaaacctggagaggtgactgtggtcgaagttgagactcctcaatcaataacaaatcaggagcaagctaggacagaaaaccaagtagtagagacagaggaagctccaaaagaagaagcacctaaaacagaagaaagtccaaaggaagaaccaaaatcggaggtaaaacctactgacgacacccttcctaaagtagaagaggggaaagaagattcagcagaaccagctccagttgaagaagtaggtggagaagttgagtcaaaaccagaggaaaaagtagcagttaagccagaaagtcaaccatcagacaaaccagctgaggaatcaaaagttgaacaagcaggtgaaccagtcgcgccaagagaagacgaaaaggcaccagtcgagccagaaaagcaaccagaagctcctgaagaagagaaggctgtagaggaaacaccgaaacaagaagagtcaactccagataccaaggctgaagaaactgtagaaccaaaagaggagactgttaatcaatctattgaacaaccaaaagttgaaacgcctgctgtagaaaaacaaacagaaccaacagaggaaccaaaagttgaacaagcaggtgaaccagtcgcgccaagagaagacgaacaggcaccaacggcaccagttgagccagaaaagcaaccagaagttcctgaagaagagaaggctgtagaggaaacaccgaaaccagaagataaaataaagggtattggtactaaagaaccagttgataaaagtgagttaaataatcaaattgataaagctagttcagtttctcctactgattattctacagcaagttacaatgctcttggacctgttttagaaactgcaaaaggtgtctatgcttcagagcctgtaaaacagcctgaggtaaatagcgagacaaataaacttaaaacggctattgacgctctaaacgttgataaaactgaattaaacaatacgattgcagatgcaaaaacaaaggtaaaagaacattacagtgatagaagttggcaaaacctccaaactgaagttacaaaggctgaaaaagttgcagctaatacagatgctaaacaaagtgaagttaacgaagctgttgaaaaattaactgcaactattgaaaaattggttgaattatctgaaaagccaatattaacattgactagtaccgataagaaaatattggaacgtgaagctgttgctaagtatactctagaaaatcaaaacaaaacaaaaatcaaatcaatcacagctgaattgaaaaaaggagaagaagttattaatactgtagtccttacagatgacaaggtaacaacagaaactataagcgctgcatttaagaacctagagtactacaaagaatacaccctatctacaactatgatttacgacagaggtaacggtgaagaaactgaaactctagaaaatcaaaatattcaattagatcttaaaaaagttgagcttaaaaatattaaacgtacagatttaatcaaatacgaaaatggaaaagaaactaatgaatcactgataacaactattcctgatgataagagcaattattatttaaaaataacttcaaataatcagaaaactacattactagctgttaaaaatatagaagaaactacggttaacggaacacctgtatataaagttacagcaatcgcagacaatttagtctctagaactgctgataataaatttgaagaagaatacgttcactatattgaaaaacctaaagtccacgaagataatgtatattataatttcaaagaattagtggaagctattcaaaacgatccttcaaaagaatatcgtctgggacaatcaatgagcgctagaaatgttgttcctaatggaaaatcatatatcactaaagaattcacaggaaaacttttaagttctgaaggaaaacaatttgctattactgaattggaacatccattatttaatgtgataacaaacgcaacgataaataatgtgaattttgaaaatgtagagatagaacgttctggtcaagataatattgcatcattagccaatactatgaaaggttcttcagttattacaaatgtcaaaattacaggcacactttcaggtcgtaataatgttgctggatttgtaaataatatgaatgatggaactcgtattgaaaatgttgctttctttggcaaactacactctacaagtggaaatggctctcatacagggggaattgcaggtacaaactatagaggaattgttagaaaagcatatgttgatgctactattacaggaaacaaaacacgcgccagcttgttagttcctaaagtagattatggattaactctagaccatcttattggtacaaaagctctcctaactgagtcggttgtaaaaggtaaaatagatgtttcaaatccagtagaagttggagcaatagcaagtaagacttggcctgtaggtacggtaagtaattctgtcagctatgctaagattatccgtggagaggagttattcggctctaacgacgttgatgattctgattatgctagtgctcatataaaagatttatatgcggtagagggatattcgtcaggtaatagatcatttaggaaatctaaaacatttactaaattaactaaagaacaagctgatgctaaagttactactttcaatattactgctgataaattagaaagtgatctatctcctcttgcaaaacttaatgaagaaaaagcctattctagtattcaagattataacgctgaatataaccaagcctataaaaatcttgaaaaattaataccattctacaataaagattatattgtatatcaaggtaataaattaaataaagaacaccatctaaatactaaagaagttctttctgttaccgcgatgaacaacaatgagtttatcacaaacctagatgaagctaataaaattattgttcactatgcggacggtacaaaagattactttaacttgtcttctagcagtgaaggtttaagtaatgtaaaagaatatactataactgacttaggaattaaatatacacctaatatcgttcaaaaagataacactactcttgttaatgatataaaatctattttagaatcagtagagcttcagtctcaaacgatgtatcagcatctaaatcgattaggtgactatagagttaatgcaatcaaagatttatatttagaagaaagcttcacagatgttaaagaaaacttaacaaacctaatcacaaaattagttcaaaacgaagaacatcaactaaatgattctccagctgctcgtcaaatgattcgtgataaagtcgagaaaaacaaagcagctttattactaggtttaacttacctaaatcgttactatggagttaaatttggtgatgttaatattaaagaattaatgctattcaaaccagatttctatggtgaaaaagttagcgtattagacagattaattgaaatcggttctaaagagaacaacattaaaggttcacgtacattcgacgcattcggtcaagtattggctaaatatactaaatcaggtaatttagatgcatttttaaattataatagacaattgttcacaaatatagacaatatgaacgattggtttattgatgctacagaagaccatgtctacatcgcagaacgcgcttctgaggtcgaagaaattaaaaattctaaacatcgtgcattcgataatttaaaacgaagtcaccttagaaatactatactcccactactgaatattgataaagcacatctttatttaatttcaaattataatgcaattgcctttggtagtgcagagcgattaggtaaaaaatcattagaagatattaaagatatcgttaacaaagctgcagatggttatagaaactattatgatttctggtatcgtctagcgtctgataacgttaaacaacgactactaagagatgctgttattcctatttgggaaggttataacgctcctggtggatgggttgaaaaatatggccgctataataccgacaaagtatatactcctcttagagaattctttggtcctatggataagtattataattataatggaacaggagcttatgctgctatatatcctaactctgatgatattagaactgatgtaaaatatgttcatttagaaatggttggtgaatacggtatttcagtttacacacatgaaacaacacacgtcaacgaccgtgcgatttacttaggtggctttggacaccgtgaaggtactgatgctgaagcatatgctcagggtatgctacaaactcctgttactggtagtggatttgatgagtttggttctttaggtattaatatggtatttaaacgcaaaaatgatgggaatcagtggtatattacagatccaaaaactctaaaaacacgagaagatattaatagatatatgaagggttataatgacactttaactcttcttgatgaaattgaggctgaatctgtgatttctcaacaaaataaagatttaaatagtgcatggttcaaaaaaatagatagagaataccgtgataacaataaattaaatcaatgggataaaattcgaaatctaagtcaagaagagaaaaatgaattaaatattcaatctgttaatgatttagttgatcaacaattaatgactaatcgcaatccaggtaatggtatctataaacccgaagcaattagctataacgatcaatcaccttatgtaggtgttagaatgatgaccggtatctacggaggtaatactagtaaaggtgctcctggagctgtttcattcaaacataatgcttttagattatggggttactacggatacgaaaatgggttcttaggttatgcttcaaataaatataaacaacaatctaaaacagatggtgagtctgttctaagtgatgaatatattatcaagaaaatatctaacaatacatttaatactattgaagaatttaaaaaagcttacttcaaagaagttaaagataaagcaacgaaaggattaacaacattcgaagtaaatggttcttccgtttcatcatacgatgatttactgacattgtttaaagaagctgttaaaaaagatgccgaaactcttaaacaagaagcaaacggtaataaaacagtatctatgaataatacagttaaattaaaagaagctgtttataagaaacttcttcaacaaacaaatagctttaaaacttcaatctttaaataattgaaatctctcatctgctttgcggatgagggttttcttattttatgctatacttaaggtatgcatagaaaaacagtgattgattttaggactttgggggagagatatacctttacccagcctattaaagagttgaaaacgagaaatgtagaagaagtggcagatttgctggcacaagtggaaagctaccaagagcaaggttattatgtggtggggtatgtcagctacgaggctgcacctgcttttgaggaaaaattagcagttcacaaggatcccctactgggagagtacctgctttactttactgttcatgatatcgtagaaacttcccctattcctctgacttatgaggatattgatttgccctcaaattggcaggaagtaacgtctgcagcagactatgaaaaggccattgcccaaattcaccatcatttacggcagggagatacctatcaggtcaactacaccgtccaacttaagcaaaagttaaatgccaatccttttgccatctacaatcgtatggtggtagagcaggaggcgggctacaatgcctatgtggaacatgacgagatgacagtgatttccatgagcccagagctcttttttgagcaaaatgatcgcgagttgacaacacgaccaatgaaggggacgactcagcgtggggtaactgaccaagaagatcttgaacaggccagttggttggaacaggatcccaaaaatcgctctgaaaatatgatgattgtggacctcttgcgcaatgatatgaaccgtatttctgaagttgggagcgagcacgtggagcgtctgtgtcaggtagagcagtattcaactgtttggcagatgacttcgaccatcaagagtcagttgcgagaggatgtggaccttgttgaaatcttccgctcactctttccttgtggttccataacgggtgcaccgaaaattgcgacaatggagattatcaaggacttggagcctcaaccgcgtggagtctactgtggaacgattggtctcttgcttccaaatggacgacggatttttaatgtggccattcgtaccattcaacttcacaaaggtcaagccatttatggagttggcggagggattacttgggatagcacatgggaatctgaataccgagaggttcatcaaaaggcagcagttctctatcgtaaacaagctcgcttccaattaattacaactggaaaaatcagccaaaaacaactgatgtttgaagaacaacatctggaaaggctgagaaaagctagtcgttattttgcttttccttttgatgcagaagacttgggacacaagattgaggaagagtgtcaggattgtgaagctaatcgagattaccgcttgcgaatcagccttagcaaatctggagagatagaagtcaatcgtcaagtattaacccctctcagtacaagcttttgtcaggcccaagtctgtcttcaggaagctgctttgaatcaatcctttacctactttaaaaccactcaccgaccgcatttgagcctaggagaacaagagaagatttaccacaataagtcaggagaactgcttgaaacctctataggaaatttggttctgaaaatcgctggaaaactctacacaccgcctatccgacttggaatcttgccaggaatttaccgtcagcatttgctagaaacaggacaggtagaagagaaagtcttgaccttggcagatttaacccaagcagaagctatttacggctgtaatgcagtgagaggcttgtatgaattaagccttgaggagaactagatgaaattaatatttttgcatgggttagggcagtcagcagagtcttggaaagaagttcggaatctactgacagattatccttctgaggctatcgagttatttccttctggagttagtaactatcaacaagctaaagagcgagtttatcagcacctagctcaagagacagaaccttttgttttgattggattgtccttaggtgctgccctgacactagaactttccagttacgatttaccaaatcttcgagctttgattctgtcaggatgcccgcttaaattagcagggaatatcctattttatcttcaattgctgatttttaaactacttcccaaaagagtatttgaaaaacagggagcagacaagactcttatggtcggagtttctgaggagttgaagacacttgatttaacggatatagcaggaacttacccttatccaaccttactaatttgtggcagcaaagataaaccgaatcttagttctatgaaagctctccatagactgttaacagattcgcagtttcagatcattcctgatggccctcatgtcttgaataaggcaaaaccaaaggagtttgtagaaaagaccagaagtttccttgaattgctgaaataagtttgataaaataatattgaaatcgatatcataattatgggagaaagaaatgaataaacgtctattttcaaaaatgagtctggtgacgttgccaattttagccttgttttcacaatcagttttggcggaagaaaacatccatttttcgagctgtaaggaagcttgggcgaatggctattcggatattcacgagggagaacctggttattctgccaagttagaccgtgatcatgatggtgtggcttgcgaattgaaaaatgctcctaagggtgcttttaaagcaaaacagtcaacggctattcaaatcaacacaagttcagcaacaacaagtggttgggttaagcaggacggcgcttggtactactttgatggaaatggaaatctagtgaaaaatgcatggcagggaagctattacctgaaagctgatggtaaaatggcacagagtgaatggatttatgactcttcttatcaagcttggtattatttgaaatcagatggttcttatgcaaaaaatgcatggcaaggagcttattaccttaaatcaaacggtaaaatggcacaaggtgagtgggtttatgattcttcttaccaagcatggtattacttgaaatcagatggttcatatgctcgcaatgcatggcaaggaaactactatttgaaatcagatggtaaaatggctaaaggtgaatgggtttatgatgccacctatcaagcttggtattatttgacatcagatggttcttatgcttacagtacatggcaaggaaattactatctaaaatcggatggtaaaatggctgtcaatgaatgggttgatggtggacgttattatgttggcgctgacggagtttggaaggaagttcaagcaagtacagcttcttctagtaatgatagcaatagtgaatattctgctgctttaggaaaggcaaaaagttataattcgttattccacatgtcaaaaaaacgtatgtatagacaattaacttctgattttgataaattttcaaatgatgcagctcaatatgccattgatcatttagatgattaacagatactggtaggcgaaaaaattccttataattcattcacgcaaacctttgcataagtgaatggattttgatatactagtactgtaagcattttcaattactacacaatgaaaaaggagaatatgatgagtcaaaagattattgggattgaccttggtggaacttctatcaaatttgcaatcttaacaacagcaggagaaatccaaggaaaatggtcaatcaagaccaacattttggatgagggaagtcatatcgttgatgatatgattgagtctattcaacatcgtttggacttgcttggattggcagcagcggacttccaaggcattggaatgggatcaccaggtgtggttgaccgtgacaaagggactgttatcggtgcctacaacttgaactggaaaacccttcaaccaatcaaacaaaagattgaaaaagctttgggcattccatttttcatcgataatgatgccaacgtagcagctcttggtgagcgctggatgggtgctggagataaccaaccagacgttgtctttataacactcggtactggtgttggtggtggtattgtcgcagaaggcaaattgcttcatggtgttgctggtgcagcaggtgaacttggtcatatcactgttgactttgaccaaccaatctcatgtacttgtggtaaaaaaggctgccttgagacagttgcttcagcaacagggattgtcaacttgactcgtcgctatgccgatgaatacgaaggcgatgcagccttgaaacgcttgattgataacggagaagaagtaactgctaagactgtctttgatctcgcaaaagaaggagacgaccttgctttgattgtttaccgtaacttctcacgttacttgggaatcgcttgtgctaacattggttcaatcctaaacccatcaacaatcgtcatcggtggtggtgtgtcagctgcgggagaattccttctacaaggtgttcaaaaagtttacgatgaaaatagtttcccacaagtacgcacatctactaaattagctcttgcaactctaggaaatgacgctggagttatcggagcagcatcacttgtattgcaataagataatgagagaggaaaatgctaacctagagttagtaatgttcctcttttattttttatgctatactagttaggacaatgaatgaggtgaaacgaaatgacaaaagcagatacgatttttaaagagaatattgaacgcattctaaaggaaggtgttttctcagagcaggctcgtcctaagtacaaggatgggactgttgctaattccaagtatgtaactggtgccttttccgagtacgacttatctaaaggagaatttcctatcacaaccttgcgtcccattgcaatcaaatccgccatcaaagaagttctctggatttaccaagaccagtcaaatagcttagaagtgcttaatgacaagtacaatgttcactactggaatgactgggaagttggagacacgggaaccattggtgagcgctatggtgccgttgttaagaaacacgacattatcaataagcttctcaaacagttggaaaccaatccttggaaccgccgcaatattatttcgctctgggattaccaagctttcgaagaaacagatgggctgctcccgtgcgcctttcagaccatgtttgatgttcggcgtgttgatggggaaatctatctggatgcgaccttgacccagcgctccaatgatatgctggtggcccaccacatcaacgctatgcagtatgtggctttgcagatgatgattgccaaacattttggctggaaggttgggaagttcttctacttcatcaacaacctccatatctatgataatcaatttgaacaagctcaggaattgctccgtcgggagccgtcaaactgccaaccacgcttggttttaaatgttcctgatgggactaatttctttgatatcaaagcagaagattttgagttggtggattatgaccctgttaagccacagttgaagtttgacctagctatttaaaagaatagaaaaaagaagttgagaataatcccaacttcttttgtttcttaacgtgatacgcggcgacgagctgcttttttacggttttcttcgatgaaagctgctttttgctcttctggttcgattactttctttttaaatgcgtatactgcacctgcaacggcagcgacagttcctgcgacacctgttacaagacctttagcgaatcctttagccatgagtcttcctcctttatattctcaatcagccagcctcctcaagaggtcacatttttctgactgacctttttgtgttataataatagtaacgaaaaaatgggaatttttcaaggaaaaaagatgaaaacaaaaataattgtgattgttggaccgactgctgttggaaagacggctctagctattgaagttgcaaagcgttttaatggcgaagtggttagtggagatagccagcaagtctatcgaggacttgatattgggacggccaaggctagtccagaagagcaggcagctgttcctcatcatttaatcgatgttagagagataaccgagtcttactcggcttttgattttgtttcagaagctaagatgactattgagggtattcacaaccgtggcaagctagccattatcgccggtgggactggactttatatccagagcttgctagaaggttaccacctaggtggggagactcctcatgaggagattttagcttatcgagctagtttggagccatattcagatgaggaattagcccatttggtggatcaagcaggccttgagattccccagtttaatcgtcgtcgtgctatgcgtgccttagaaattgcccattttggtcaggatttggaaaatcaagagaccttgtatgaaccgctgattatctgcttggatgatgaacgtagtcaactttatgagcgtatcaaccaccgagtggatttgatgtttgaggctgggcttttggatgaggccaagtggctgtttgaccattcccctaatgtacaggctgctaaaggaattggctataaggaactctttccttatttccgtggagagcagaccttggaggaagctagtgagagtcttaaacaggcgactcgtcgttttgccaagcgtcagctgacctggttccgtaatcgcatgcaggtcaccttttatcagattggagaatctggtgtacaagaccgcattttaagccagatagaggagtttttagatgattgaaacggagaaaaaagaggagcgagtcctgctgattggtgtggaattgcagggtatggacagttttgacctctccatggaagaattggctagtttagcgaaaacggcaggggcagtcgttgtagatagctacagacaaaaacgtgaaaaatatgattccaagaccttcgtcggctctggtaagttggaagagattgcgcttatggtggatgcagaagaaatcactactgtcatcgtcaacaatcgtctgaccccaaggcagaatgtcaatctagaggaagttctcggtgttaaggtcattgaccgtatgcagttgattttggatatctttgccatgcgggctcgaagccatgaagggaagctccaagtccacctagcccaactcaaataccttttgcctcgcttggttggtcaggggattatgctcagccgtcaggcagggggaattggttcccgtggtcctggtgaaagccagctggagctgaaccgtcgtagcgttcgcaatcaaatcacggatatcgagcgccagctcaaggtggttgagaaaaatcgtgcgactgtcagagaaaaacgtttggagtctagcacttttaagattggtttgattggttatactaatgctgggaaatcaactatcatgaacatcttgaccagtaagacccagtatgaagcagatgagctctttgcgactctggatgcgacaaccaagagtattcatctgggaggcaatctccaagtaactttgacagataccgttggctttatccaagatttgccgacagagttggtgtccagtttcaagtcaaccttggaagaaagcaagcatgtggaccttctggttcatgttatcgatgctagcaatccttaccacgaggagcatgaaaaaacggttctctccatcatgaaagacctggacatggaagatattcctcacttgacgctttataataaagcggatttggtggaggatttcacgcctacccaaacgccatataccctcatttctgccaagtctgaggacagtcgtgaaaacttgcaagcattattgctagataagattaaggaaatttttgaagcatttaccctgcgagtgcctttttcaaagtcctacaagattcatgatttagagagtgttgcaattctggaagaacgtgattatcaggaagacggcgaagtgattacaggctacatttccgagaaaaataaatggaggttagaagaattttatgactgatattaaaactttggctctaaagtatggaggttatacaagtctggacaaggtctatctggatcagcttctagctggtaaaacagatcaggagcagttaacacttattacacctccgccaagtgttgttaatgcctactttgcagaactctatcagaaaaagagtcctcaggctgcgacggattattttgcagaactcagtcaggaactgaatctttacaatactgagccaagtttcaccctagaaaataagccttttattcggcttaatctgtctggtaaatcctttggtttttgttatgagagtgacggccttggtcggattttctttgaaaatgaggagaaaatctcggatgacttgctctttgaaattgcgcaaattttcccccatcaattagtctttgaagagtctggtaagatttacatgaagcctgtcgaggacgaggaagttatcagcctagaaagtctcacagctttgactgatttggaaagattggctgatggtcgaaaacgtctcaaaggctacagccaagaggatttattgcaagaagctgctgctttttctggcaaacgctatttccgatcggaaaaccgcacagccatgttatatattgattaattagaaagtatcgaatggatattcaatttttaggaacgggggctggtcagccctctaaagcccgcaacgtttcaagtctcgccctgaaacttttggatgagattaacgaagtttggctctttgactgtggagaaggtacgcaaaatcgcattctggaaaccacaattcgaccacgtaaggtcagcaaaatctttattacccatctgcatggagaccacatttttggtttgccaggtttcctttctagccgtgcctttcaggccaatgaagagcagacagatttggaaatctacggacctcaaggaatcaagtcatttgtcttaaccagccttcgtgtgtcaggttctcgtctgccctaccgcattcatttccatgagtttgaccaagattctctgggtaaaattcttgaaaccgataaattcactgtgtatgcagaggagctggaccacactattttctgtgttggctatcgtgtcatgcaaaaggatctagaagggacgctggatgctgaaaaactcaaggctgctggtgttccgttcggcccgctttttggtaaaatcaaaaacggccaggatcttgttttggaagacggaactgaaatcaaggcagcagactatatctcagcgccacgtccaggtaagattatcactattttaggagacactcgaaaaacgggtgccagtgtgcgtctggctgtcaatgcagatgtcctagttcatgagtccacttatggcaagggtgatgaaaaaattgctcgtaaccatggtcactcaactaatatgcaagctgcacaagtagcggtagaagcaggtgccaaacgcctcctactcaaccatatcagtgcccgtttcctctcaaaagatattagcaaactcaagaaagacgctgccacaatttttgaaaatgtccatgtggtcaaagacttggaagaagtggaaatctagcagtcacagaaaggataagtatgcctactattctcattaccggagctagcggtggtctagctcaagaaatggtcaaactcctgcccaatgaccaactcatcttgcttggtagaaataaggaaaaattagcccaactctacggaaattattcccatgcagaattgattgaaattgatattaccgacgattcagccctagaagctctggtaactgatctttatctccgctatggcaagattgatgtcttgattaacaacgctggttacgggatttttgagggatttgaccagattgctgataaagatattcaccagatgtttgaggtcaatacctttgccctgatgaatctgtctcgtcaccttgcggctcgtatgaaggaaagcagcaaagggcatatcatcaacatcgtcagcatggcaggtctaatagctactggcaagtctagtctttactcagcgaccaagtttgcggctattggtttttcaaatgctctgcgactcgaacttatgccctatggagtctatgtgacaacagtcaatccaggaccaatccgtacaggatttttcgaccaagccgacccagatggaacttatcttaaatcggttgatcgcttcctgctagaaccagatgcagtggctaaaaagattgtcaagattataggaaaaaacaaacgagaactcaatctcccgattttgttgaacctagcccataagttttatactctctttcccaagctagctgataagttggcaggggaaacttttaattataagtaaaaagaaccaatgtgcaggttgttgctagcctacatattggttcttatcatttctcaactatcaaactgaacttcttctaggagatagtctataaagcgttcgcccatcttagataggctggttttctcatgctggatatagaccagctcgatcgggtcatcaatatccagtgggatagaaacgatattgtctccgtttaggttgctgttcaaaatccctgtcgcaatggtataaccatccaaaccaatcaagagattaaagagggtggcacggtcactgaccacaatggatttcttgtggtgttcttgagaaagaatctcttctgaaaagtagaaggagttgtgcgtcccttggtcatagctgaggtaagggaaattctccaaatcagacagtttcaccttgtctttctttgccagagggttggtcttgctgacaaagatatgcggttgcgctgtgaagagatggtgggctagcaggtgattgtcatccagcatcttggttaaaacatcacggttgtaactgtttaagaagaggaccccgacctcactgcggaagttcttgacgtcgtcgataatctcccaagtccgagtttcacgaaggaagagttcgtatttctccatatcgcttttcttgagcaaagagacaaaggcattgaccacaaaggcatagtgttgagacgaaacgctaaagagttcgcggtgggcgacaggatttttatagcgttcctccagaagctgggtctgctcgacaacctgacgggcataagagagaaactccatgccatcacgggtcaaggtgattcccttgggattgcggataaagatctcaatgcccatttcattttccaaatctcgcactgcattggagagacttggctgagtgataaagagttgcttggctgcctcattcatggagccagtttcgacgattttgataatataatgtaattgttgaattctcatgtttttattgtaccatacttgccttagaatcgctaaagaagataggaaaataaggagcattgtgtgagtctcttcttgaaaaaaacacaaaattttgctagaatgagtcttatgaaaacattctatgatgtgcagcaattcctcaaacgatttggtattattgtttacatgggaaaacgcttatatgatattgaactgatgaagttggaactatctcggatttacgatgcagggttgatggataaattagactatctagaggcagaagcagttcttcgcagagagcacaaggtagaattggattatattgagaaaaatggagaaaagaactaatggttacttggattttgtgggcacttatactagcaatgttggcgtggatgggctttaactatcttcgtattcgccgtgcggctaaaattgtggacaatgaggagtttgaagccttgattcgtacgggtcaattgattgatttgcgcgacccagcagaattccacagaaaacatatccttggtgcacgcaatattccttcaagtcagttgaaaactagtcttgcagcccttcgtaaagataaacctgtccttctctacgaaaaccaacgtgcgcaacgagttacaaatgcagctctttacttgaaaaaacaaggtttttctgagatttatatcctttcttatggcttggattcttggaaagggaaagtgaagactagctaaccttatttccaaattagtcgaatgataggatgaagctattgttttatagtataattaatttgtataaaatttaaggagttcttagaacataaaagaaaagaagaaaaatccactttttgtgggtatcttgtcgattattcttggtttgttatttccaattgtaggcctgattttgggtatcataggattggtcttggctatttcataccaaaaagagtcacaattagactataaaatagaaaagattcttaatatcttaggaattgtgatttctgtagttaactggattgtagcaatcgccttaatttttcggtaaataaaagaaaaaagctttagttttaaagctttttttgttttatcgactcatctctaaatagtttttaatgatttgtaactctttttggttcaaagggcggtagttaccttctgctaaatctgggttcaatgtgaagtccccaaattggattcttttgaggctagtcaccttaacaccaaccgagaggaacattttcttgatttgatgaaattttccttctgaaatggtgatagaggcttgactgagggagggacttgcagatagaatctctagttttgcgggtttacagacagtgtcatctaaaaagacaattcctttttgaaaggtttggatatggtcaggtgttagaagtccattaacctcaacttggtaagtcttatcgacatgatattggggatggaggagctgaaagcccaagggaccgttatcggtcaagaggaggagtcccgttgtatctcggtccagtcggccaacggcatagagcttgtcagactggatgttagatggaagcaggtccatgacggtcggaagttccttgtctttgttggctgtaacggcaccagcaggtttatgaagcataagataggtgtgttcatagccttgaatgattcgatcctgaaaaaggagttcttgtagtcctgtatcgatattttgagctagggagcgggctgggcaaccatcgactagaatttcccctctgaggagtgcttgcttcatggcctttcggctgattttttcttgagctaataaattatctaaacgcatactgtgcctatcttatcataagtcgctcgctttgaaaaggcttgacgtgaaaagaaaagcagagtgaaaacatttacacttgcttgagttatgttatttatttgaaattatggtataatcgttcagttagaaaataaattttgaatattatagaggaaatcatgacaaaattaagagaagatatccgtaacattgcgattatcgcccacgttgaccacggtaaaacaaccctggttgacgaattattgaaacaatcagaaacgcttgatgcacggactgaattggcagagcgtgctatggactcaaacgatatcgaaaaagagcgtggaattaccatccttgctaaaaatactgccgttgcttacaacggaactcgtatcaacattatggacacaccaggacacgcggactttggtggagaagttgagcgtatcatgaaaatggttgacggtgttgtcttggtcgtagatgcctatgaaggaaccatgccacaaactcgtttcgtattgaaaaaagccttggaacaagaccttgtcccaatcgtggttgttaacaaaatcgataagccatcagctcgtccagcagaagtagtggatgaagtcttggaacttttcatcgagcttggtgcagatgacgaccagcttgatttcccagtggtttatgcttcagcgatcaacggaacttcttcattgtcagatgatccagctgaccaagaagcgactatggcaccaatctttgacacgattatcgaccatatcccagctccagtagataactcagatgagcctttgcagttccaagtgtcacttttggactacaatgacttcgttggacgtatcggtatcggtcgtgtcttccgtggtacagttaaggttggggaccaagttaccctttctaaacttgacggtacaactaaaaacttccgtgttacaaaactcttcggtttctttggtttggaacgtcgtgaaatccaagaagccaaagcgggtgacttgattgccgtttcaggtatggaagacatctttgtcggtgaaaccatcactccgacagatgcagtagaagctcttccaatcctacacatcgatgagccaactcttcaaatgactttcttggtcaacaactcaccatttgctggtaaagaaggtaaatgggtaacttctcgtaaggtggaagaacgcttgcaggcagaattgcaaacagacgtttcccttcgtgttgacccaactgattcaccagataaatggactgtttcaggacgtggagaattgcacttgtcaatccttatcgaaacaatgcgtcgtgagggctatgaacttcaagtatctcgtccagaagttatcgtaaaagaaatcgacggtattaaatgtgaaccatttgaacgtgtacaaatcgacactccagaagaataccaagggtctgttatccaaagcctttctgaacgtaaaggtgaaatgttggatatgatttcaactggtaatggtcaaactcgtttggtcttccttgttccagcgcgtggtttgattggatactcaactgagttcttatcaatgactcgtggttacggtatcatgaaccataccttcgaccaatacttgccattgattccaggggaaattggtggacgtcaccgtggtgcccttgtttctatcgatgctggtaaggctacaacttactcaatcatgtctatcgaagaacgtggtacgatctttgtcaacccaggtactgaggtttatgaaggaatgatcatcggtgaaaactctcgtgaaaatgacttgacagttaacatcacgaaggcaaaacaaatgaccaacgttcgttcagctactaaggaccaaacagctgttatcaagacgcctcgtatcttgacacttgaagagtctcttgagttcttgaacgacgatgagtacatggaagtaacgcctgagtctatccgtttgcgtaaacaaatccttaacaaagcagagcgtgagaaagctaacaagaagaaaaaatcagctgaataagagctagaaagagagaaagatggtctatttagtcctaggaattttactgctcctactctatgtatttgcgacaccagaaagcattaaagggactgtcaatatcgtcgctatggtatgtattttagtggcactcttgattttattggttctatcttttctgaaaatttttcaattaccaacagaaatattcctagcaatagccatgttgatcctagcttactttagtgttagagacatcacactcatgccagtcaaaaaaagtaaaagaagataaaaaagagagtttcggctctctttttgctaggaattttacaatagtttgaattgctttttagttaacaccatctcttttacttgtatagtatgaatgggaaaaacttgaataaaattcgttaatggcatctattttatatttggttagtactggttgcatattattttgaaataaaactactatataatattattcacagaggtaatatagtaaaatatctaaaaaattcgattttttccttgacaacaaataataaaaaagttattcttatcacataagaaagcggtttcaataaaagagagaggaggatttattttgttgcattgttgctcaaggtgtgctttttttgaaagaaaaaataaaatgaaaacgaaaaaacatagattacttgctctagctcttatttcaagttttacattattgggagctgcatcagctgctgtataatatccagatggaggagtatggacatatggagaaggttcaggaggtggttaggctttttcaaattactatcatggtaaaaaatatcattattcatctatcgtgagcagatgggatggtcattctgataaaggagaagctcctgctggaaaacctcctatgcatggatttggactaaatggggagaacaagtagcattttactgtgattatgactaatcgttcattgatttaaatcgttccccttgtaagaaattacagggggaattttgtttacaaggagtctactatgaagaaactattcatattattatcaactttttttctcagcttcttccttgcttggattattgtcttacgtgcgccacaatatttatatgcaagctatgattccgtttctttacttcgtgtcaaaaaagatactcaggaaccgacgcgtgaggtatttgaacaggaattggagaattttgcaaactcagaacagagtttaatagctagaagaattgtagagccgagtaaggatgggacgactcactttacttatgcaacttatggtcagggaactttaccaaaagaattccaagaagctagccaagaaagtcgtgaacgtagtgatccgctaaatagttatctccttttgtcaggctccttgacgaaagaaaagcttgccgataaattaggagatttgggttataaagcaagtgctgaccgaaagataccgccctattttcttgcttttcgaatattactaaatccccttattttaattagtttagcaatatttggcttatctttctttgctttagtgattatcactcggattaaggaaatgagagcagcaggtataaaactcttttctggtcagactctcttatccatcatggggcattctttatctactgatatcaaatggctccttctatcagccctcctttccttcctaggtgggggagtcgttctttttagtcaaggtttgttttatcctatcttgttagccacctatggttttgggattagtttctatctgttgtttttattggcgatttcaattttactaatgctcctttacctaatgagtttgagttacaaagcattagttcccgttattaagggaagattaccccttaaacgcttgatggctttaaccctattgtgtcagttagtagctgtttttacagtaggctacgctgttaagacaggtttgacgtcttaccaacgattgaaagaacttgaaatttcaaaacaagcatggcaggacagagcagactattaccagatttcctttggcttaggtgatagaggaaaagatacagaaaatcagagcaagtggtatgcctttgccaaggaagcaatcgaagaagaacaagctctttatgtaaaggataatctgctccattttgccaatccacaaggaaaaaatgaacagggagagacactggatacctatagttcagatgctaatacgctctatgttagtcccagttatttggacaaggaaaaggtcgtggtagatgctgagaccaaacagaagttagcccatctccaaaaaggtgagtttatcctcttgctcccagaacatttgcgctctcgagaagcagaacttaagaaagtttttgaagaaagattgagttattatggaaaatctggtgaggaggcaagtgctcctttggattatgagatgaaagcgcacgttagttatctttcaatgggagaaaagcggtttgtttataataacggtgagaatcccgtatctactcagtatttgactgatccgattttagtggtattcacgccgacttctacaggtgatagttttatatccttatctagttggtctatcaatgctggaaaacaactctttatcaaaggatatgagagtgggctagaactcttgaagaaagctggaatttatgagcaagtatcctatcttaaagaaggaagaagtgtttatctaactcgttataatgaagttcaaactgaaacagcaactttaatcttaggagctattgttggaatagccagttccttgttactcttttattctgtcaatcttctatatttcgagcaattccgccgagatatcttgattaaacgaatttcaggtttacgattttttgaaacacatgctcagtatatggttagccaatttgctagttttgtatttggtgctagtctctttattttaagcagtcgagacttggtgattggcttgctcactttattggtctttctagctagtgcagttttgacgctttaccgtcaagcgcagaaagaatctcgtgtttctatgacaattatgaaaggaaaataggatgattgaactaaagaatatatctaaaaaatttggaagccgtcagctattttcagatatgaatcttcattttgaaggtgggaaaatttatgccttaatcggtacaagtggctgtggtaagacaacactcttgaatatgattggacgattggagccatatgacaaagggcaaatcatctatgatggcacttctcttaaggacatcaagccttctgttttctttagagattacttaggatacttatttcaagattttggcttaattgaaagccaaaccgtcaaagagaatctcaatctgggtttagttggtaaaaagttgaaggaaaaagagaaaatctctttgatgaaacaagctctaaaccgtgtaaacctctcttatttggatttgaagcaacctatatttgagttatcaggaggagaagcacaacgtgttgcactagcgaagataattttaaaggatccacctttgatcctcgcagatgaaccaaccgcttccttagaccccaaaaactctgaggaattactttccatcctagaatctttaaaaaatccgaatcggaccattattattgcgacccataatcctctgatttgggagcaagtggatcaggtcattcgagttaccgatttatcacatagatgatatggtaagattcagttagaagaaagagtcacaaacacactttgtggcttttttatttccataaaaatggtaaaatagtaggagtagaaatggagttcgagacatgaaagtaatagatcaatttaaaaataagaaagtccttgttttaggtttggccaagtctggtgaatctgcagctcgtttgttggacaagctaggtgccattgtgacagtaaatgatgggaaacctttcgaggacaatccagctgcccaaagtttgctggaagaagggatcaaggtcattacaggtggccatcctttggaactcttggatgaagagtttgcccttatggtgaaaaatccaggtatcccctacaacaatcccatgattgaaaaggctttggccaagggaattccagtcttgactgaggtggaattggcttatttgatttcagaagcaccgattattggtatcacaggatcgaacggtaagacaaccacaacgactatgattggggaagttttgactgctgctggccaacatggtcttttatcagggaatatcggctatccagctagtcaggttgctcaaatagcatcagataaggacacgcttgttatggaactttcttctttccaactcatgggtgttcaagaattccatccagagattgcggttattaccaacctcatgccaactcatatcgactaccatgggtcattttcggaatatgtagcagccaagtggaatatccagaacaagatgacagcagctgatttccttgtcttgaactttaatcaagacttggcaaaagacttgacttccaagacagaagccactgttgtaccattttcaacacttgaaaaggttgatggagcttatctggaagatggtcaactctacttccgtggtgaagtagtcatggcagcgaatgaaatcggtgttccaggtagccacaatgtggaaaatgcccttgcgactattgctgtagccaagcttcgtgatgtggacaatcaaaccatcaaggaaactctttcagccttcggtggtgtcaaacaccgtctccagtttgtggatgacatcaagggtgttaaattctataacgacagtaaatcaactaatatcttggctactcaaaaagccttgtcaggatttgacaacagcaaggtcgtcttgattgcaggtggtttggaccgtggcaatgagtttgacgaattggtgccagacattactggactcaagaagatggtcatcctgggtcaatctgcagaacgtgtcaaacgggcagcagacaaggctggtgtcgcttatgtggaggcgacagatattgcagatgcgacccgcaaggcctatgagcttgcgactcaaggagatgtggttcttcttagtcctgccaatgctagctgggatatgtatgctaactttgaagtacgtggcgacctctttatcgacacagtagcggagttaaaagaataatatgaaaaaaattgtctttacaggtggggggacggttggacacgttaccctcaatcttttgttaatgcccaagttcatcgaagatggttgggaagtccactatatcggggacaagtgtggtatcgaacaccaagaaatccttaagtcaggtttggatgtcaccttccattctattgcgactggaaaattgcgtcgctatttctcttggcaaaatatgctggacgtcttcaaagttggttggggaattgtccaatcgctctttatcatgttgcgactgcgtccacagacccttttttcaaaggggggctttgtctcagtaccgcctgttatcgctgcgcgtgtgtcaggagtgcctgtctttattcacgaatctgacctgtctatgggcttggccaataaaatcgcctataaatttgcgactaagatgtattcaacctttgaacaagcttcgagtttggctaaggttgagcatgtgggagcggtgaccaaggtttcggacaaaaacactccagaaccagatgaattggtggatattcaaacccactttaatcccaaattgccaactgtattgtttgttggcggttctgcaggcgctcgtgtctttaaccaattggtgacagaccataagaaagaactaacagagcgctacaatattatcaatctaactggagattctagtctgaatgagttgaggcaaaatctttttcgtgttgactatgtgaccgatctctatcaacccttgatggaattggctgatattgttgtgacacgaggtggtgccaatacgatttttgagctcttggcgatagcaaaattgcatgtcattgtgccgcttggtcgtgaagctagtcgtggtgaccagattgaaaatgcagcttactttgttaagaaaggctatgcagaagaccttcaagaaagcgatttgaccttggatagtttggaagagaagctttctcacttactaagtcacaaggaagattaccaagctaagatgaaagcttctaaggaattgaaatctctagcagatttttatcaattgttgaaaaaagatttatcataaggaaagtaaatgtcaaaagataagaaaaatgaggacaaagaaaccctcgaagaattgaaagagttatcagaatggcagaaacgaaaccaagaatatctaaaaaagaaggctgaagaagaggcggctctagctgaggagaaggaaaaggaaagacaagctcgaatgggagaagaatctgagaagtcagaggataaacaggaccaggagagtgaaacagaccaggaagattcagaatcagctaaggaagagtctgaagaaaaagtagcatcctcagaggctgacaaagagaaagaagagaaagaagaaccagagtctaaagagaaggaggaacaggataaaaagcttgctaaaaaggctacaaaggaaaaaccagccaaagcaaagattcctggtatccatatcttgcgagccttcacgattttatttccaagtctgcttctattgtttgtctctgcctacttgctcagtccttatgcgaccatgaaagatattcgtgttgagggaacggtgcaaactacagctgatgatattcgacaggcttcaggcattcaggattcggattatacgattaaccttctgctagacaaggcaaaatatgaaaagcagattaagtctaactattgggttgaatcagctcaacttgtctatcaatttccaactaagttcactattaaggtcaaggaatatgatattgtggcctactatatttctggtgaaaatcattatcctattctttccagtggtcagcttgagactagttctgtgagtctgaacagtttaccagaaacttatttatcagttctctttaatgatagtgaacaaatcaaagtttttgtctcagaacttgctcaaattagcccagaactcaaggcggctatccaaaaggtggaattagccccaagcaaggtgacatccgatttaattcgattgaccatgaatgattcggacgaagtcttggttcctctatctgaaatgagtaagaaactgccatattacagtaagattaagcctcaattgtcagaaccgagtgtggtcgacatggaagctggaatctacagctacactgtggcggataaattaattatggaagctgaggaaaaagccaaacaagaggccaaggaagctgagaaaaaacaagaagaagaacagaaaaaacaagaggaagagagcaatcgaaaccaaacgacccagcgttcatcgcgtcgctaggtttaccttttctcttatagttctttagtgaccatgtttttacgtttaatatttgacatctgtttttctttatgttacatctgcaatgtaatcgattacaaaataatttttgatgaagaaggtaacacatatgtcagatgaagtattcttatttgaagaaattgaagaaatcgtagcccctacagatggtgaatttttgggggaagttttacttggaactggggtagttctcttaattggagtagcctgttgttaaaaagatagggagtgataatcatgcaagataactttttatttgaggaaattgaagaaatttcagtaccagttaatgatttttcagctggacttgcaacaggtatcggatttggtttagcaatccttgctcttgctggttgttgaagtttgttcatttactaacatcaagctttttcaatttcattttagacagtcatttaaattttccgtattagtcttgcagcaagagattaatagaattagtcattattttattgattgcggactgagggactagagtatgttttacttaacccctcttttatttattaaaggttaggtttgttatgagaattgttgataagattaagatattacctactccttatgagggacactatcatttatatataccatccagtaagaaacatgtattagttgggaaacaggaaaaaaatggttagagcaactaataggtcaagaatttaccatatcggacttattagtgttagtagggaagaaatatttttaaaatatcttgggactttaatataacattatctgaaaaattaaactataaaagatttaataagaattttgaaaaaatcctatcttgttgtcattatatttgcaacgatacatgaaattagtcatgcaataattgctaataattatcaaattgagatcccaaattgtggaataatgctacttttgtttaatttggctttttttgtagatttaagtggggtgcaattcctaaaaaataaaaaacaatttttgaaaattatgttagcaggaattgcttcaaattcgattttatcacttacaggtttacttgttttattgttcacatcgtataaattgcttggactcttattttttatcattaacttaggtatgatttttattaattcaattcctttttttcagtatgatagtggtattattttaagatacttgaattctaacaataataacttgaattttcaatatatagttcaacttttaatagcatttgttattatttattttcctttgagtcaactattacagtttttgacacccaatattattgttcgtagtataggaggggtggttgtttctatactgctttctatattatatatgataggaaggacgaaatatgttctacgtaaatagttatgtttttgcttataaaaaagaaggtataatgtatttacgtggtcggagtatgcgggaaatagctatagaacctcaaatttcgcaagaatttatcaacgatctatttaatagttgtaaggaactattagagatagaagaagtattaggcagtaaactaacatttgaactataaatgaacaaattttaatttcggatgagatagatattgatagtagatattctagaactaaaggttactattcgttattttataatgaagagtataataaaatacagaataaaacagtattagtattaggagcaggagtcttaggatgttatatatctctaagtctaagtatgtatggagtgaggaaacttattgtcgctgattacgatataatagaaccatcaaatttaaataggcaaattctttatacagagtcggatgttggtaaggagaagattaatgttctttctgaaaaaatacacaagtataattcagatgttcaggtagtacctatttctattaaagtttcttcagtagaagaattagaaaaaattgttgcggaatatgggagtatagattttatcgttaaagcaattgatacgcccattgatattataaaaattgtcaatcaatttgctgtatcgcataagatatcctacatatcaggagggtttaatggatgctatcttattattgataatatatatatccctaccatcggttcttgctttggttgtcggaatataaacaaagatataaataagtacactttatctgataagacaaagtggccgactacaccagagatgcctgctattttgggagggataatgactaatttaataattaaaatatttctgggatgttataatgaaatcctaatagataacgcttacgtttataatatgagaaatcatgctctaagtcaagaaaaatatgttctggaaaacggagaatgtccaatttgtaaaaaaataataaagtgaaagataacaatattagagcgaaaacatttattcgttcagtttgtttttgcttattatcaggaggagtagcttttttatctgctattgggcagttcactgttatagaaacacaattaatagtattgttcttgggtattatttttgctatatattatgcttactacaataaaaatattcaaacatcattggaaaatatagtatggcttttttcatcgtttgagattttatttttgcttgttaattttagaacatttattcagttaccagtggatatttttattggtatgataatatttttaatgctgtggatatttattatgttaggtatagtgtgtcttagttattatataactttattatttagcaaggaggcttagtatgtttaaaaaaataggtataatgagcatttgcatatatataattattttatactgcttgagaatgtatcgtattatcaataatattgaaacaatcttgctaacggttatatgcttaatgttattgttttttttaagacgtttatttgataaagataagtaaatagatgttaagtaaaaatgtagaatataaaggaggtgcaatgagtatgattgaagttagccatttatcaaaaagttttggtgataaaatagctttaaataatataagcttcactgttaaagaaggttagatttttggatttttagaaccatctggttctggaaagaccacaacgattaatattctgactgggcagttccttgccgataaaggacaatctattattttgggacaaaaatctcaaaatttaacaagcggtgaattaaagagaattggattggttagcgatacaagtggattttatgagaaaatgtctctgtataacaatcttcttttttatagtaaattttataatattagtaaatcacgtgttgataatttgttaaagcgagtaggattatatgatagtcgcaagatggtagcaggaaaattatccactggaatgaggcaacgaatgcttttagcacgagctcttatcaacaaccccgctgtactctttctggatgaaccgacctcaggtctagatcccacaacttctcgaacaattcatgagttaattttagaattgaaaacagcagggacaacgatttttctaacgactcatgatatgaatgaagcaactcttttatgtgattatgttgccttattaaataaagggaaattagttgagcaaggagctccttctgaactcattcaaagatataataaagataaaaagattaaggttacagattataatgggaatcagataacttttgattttacatcactagaacaggtatctcagactgatctggaaaatattttttcaattcattcatgtgagcctactttagaagatatttttatcacattaacaggaggaaagctaaatgcttaaacggtttctggctttggtatggttgcgttgtcaaatcatcctttccaataagagtattttattgcaagttttagtgccttttgctttcacatatttttataaatatcttatggaaacacaggggaaggtcaacgatcaacaggcattagttcttttgatgatgtgtttacctttttctttttctttggctgttggaagtcctataactattatcttgtctgaagaaaaagaaaagtacaatttacaaactcttctgttgagtggtgttaaaggctccgaatacattttatcaactatgtttcttccttttttgctaacttttgtgattatgggaactactcctcttattttaggagttacaattgtacatacttttaattatattacaatcgttcttctaacctctttatccatcattttattctatttattgataggtttaaccgcgaagagccaagtagtagctcaggttatcagtcttcctgctatgattttagttgctttcttaccgatgctatctggtttggataagacagttgcgaagataacagattatagttttatgggactatttactaagtttttcacaaaatgggaggaattttcatggaataaaactctaattcctaatctaacactacttatttggattgttcttctattaactttaattacgataactattaggaaaaagaaaatttcttaattgagttattttaatgattataaacacaagtgggaaggaaaaaatgaactgatctttttgacagcaattctacagaatagtcttattgctatattttgatttgagtgtacgaaaaaagaaaaataacaatagtgctcatactaattgcagaagttttgggtgataagataactgataaattgcaataaaaaatgcaacatttttaaatctcctctataagtgcttcaaaaagtgcttcaaaacctgtcttgtaatccaagtatttttggggacggtgattaataagctagcaaagcatcattaaggattttttcggtaattgttgccaaatcggtttaagaaaatactcacgaagaagtccattcgcattctcattacttcccctttgccaagatgaataggcatccgcaaaataaaacagaattcccatttgttcaattaaagggtaacaagcaaactctttttctctgtccgaagtgaaagtctttaactattcttttggaaagagtcttgtgaggtgttcaatagcagtcaacatggatttagctgtttttacttgacaagtgctagtagaaataatagaatagtaaaaaacctttaaagcagtccagagaggcagctaaggttagacggtgaaagggtggagactacccatttttcgtggaaccttgctgttggcaggttccttttttcgtggcttctgttggccagactctctcactagtaaaggtaaaaggagaaacctatgcgagaacatcgtccaatcattgctcttgattttcctagttttgaggcggtcaaggaatttttagctcttttcccagcagaagaaagcctttatctcaaggtagggatggagctttattacgcagcggggcctgagattgtgtcctacttaaaaggtttgggtcatagtgtctttttggatctcaaacttcatgacattcctaatacagtcaagtcagccatgaagatcttgtctcagcttggtgtcgatatgactaatgtccatgcggctggtggtgtagagatgatgaaggcggcgcgtgaaggtcttgggagtcaagccaaattgatcgctgtaactcagctcacatcaacgtcagaagctcagatgcaggagtttcaaaatatccaaaccagtctgcaagagtctgtgattcactatgccaagaagacagctgaagctggcttggatggtgttgtttgctcggctcaggaagtacaagtcatcaagcaggctaccaatccagattttatctgtctgacaccagggattcgtccagctggtgttgcagttggagatcaaaaacgagtcatgacacctgctgatgcctatcaaatcggcagtgactatatcgtagtgggacgtcccattacccaagctgaggatcctgttgcagcttatcatgccatcaaggatgaatggacacaggactggaattaaagaactagattagaaaaataaaaggagaataccatgacacttgctaaagatatcgctagccacctcttgaaaatccaagccgtttacctcaaaccagaggaacccttcacttgggcatctggtatcaagtcaccgatttacactgataatcgtgtgacactagcctatccagaaactcgtaccctaattgaaaatggttttgtggaagctatcaaagaagcctttcctgaagtagaagtgattgcaggaactgcaacagcagggattccacacggagccattattgctgataagatggacttgccttttgcctacatccgtagtaaaccaaaagaccacggagctggtaatcaaatcgaaggtcgcgtagctcaaggtcaaaaaatggtagtggttgaagaccttatttcaacgggtggttcagttcttgaagctgtagcagcagccaagcgagaaggagcagatgtacttggagttgtagcgattttcagctaccaattgccaaaagcagataagaactttgcagatgctggtgttaaacttgtgacgctttcaaactatagcgagcttatccatctagcccaagaagaaggttacatcacgccagagggccttgatcttctaaaacgctttaaagaagaccaagaaaattggcaagaaggttaggtcagtaagataaagagagacgaggctaccgagtctcttttaccattttatttaaaatatgacaatattttaaataaaataattgacaacgctttcttttgttgatataatgaaaatgtaatatgtatcaaattgatcaatcaactatcttgtttatcacttcttaagaggacgatgtcatgaaaagaagaaaaatatattccttttttgcgtagttacaaatgcatctagtttgtttctccctacagttttagctagacagattggagattatgatttaacgtcgccgcgttggggttcggatacaactagtgagcttgagaaagaaaactcctctgctggaattaataataatgacagcactggtggcggtaaaaggttaaatacctctattcgtagcgcctatagtgggtcagatattaccccggtatattcattggggtctggctctaggattgtcatgtactataatggaggtggtgacaattatattggttctggtactagattagctatggcgccacaatttggaaatcatgtaagaattcatacttcaggttcttggaatccagattcttattaacttacttgtcagagtaagccttaaagatggttgattgtgggtgtagcatgaaaaaagaatgctacaccctatttttattataaggaggagtaaggatggaatttttcatttgtaatcttgtacgagtcgttcaatcacctcgattttatatgtctttatttttgacccttctttgcatgagtttaggaaatttccttgctttcaatggtatttataaaattgaaggtttatcgattttttttgccgcttcttctattcgaggattttcaccgattagcctagtagctgcacttatctgtacactgccctattctagtcagataatagaggatgctgagagtcattttctaacagcacaattgtgtcgaatttctaaaaagaagtatctggctattgtgggtagtactgtaattatttcttcttttctagtcttttttctcccctatttattattattaggaattaatcttttagtgactccttatcaggaaatttatattggagattatagtggtgccttaaaagaattatttgattccaatcagtttctctatagtcttgtaacgactctctggtatggagtttggggcgctgtgttctctatttttggactagctagtgctttgctagtgaagaaaaaaataggagctattttcatcccagttgcctatatgatggttggtggtattttttgggctattttagggctatcttacttagaacctgtgacaacgctagctttgggatatcagaaagatatcagtctttccttagttagtgctcatcttgcttttattttatttgttagttgtttggttgtttatggtacattttttctacattcagaggactatgtataatgaaacaatttgttcaattttataaaaaagatttcttagcagtattggtttattttatattactgctatcctgtgttttatctagtacagtatatttattgcgctgtcgccaatattcaatccatccaaatgtattagaatggatcttagttttacttcaagatatgacgactggagtatattgctttccgttcacatatatattgttctttttttatttgatgaataactattttaataggttggagtgtcgcattcgtctgaaatcaattaagcactttaccagttttagtttcaaattagcagctcttagtacggggatttggacggcgactttatttttattgatttttctaattgcatttagtaatggttttagcttctctttggagataaaggaggttgattttttaagagaattttatggtataagtattgcaaacaatgctagtttctttataggattttttttctcttatatagcatactatttctttttatccttacttactattagcagtttttcttggtttaaaaaatcaaacatgagcttagtatttctgtttacttttttatttgtagaatccttattctggatttatcagttggacaatgggataattggattattgccaatttttcagtatatggtaaattccaatccgtatgcattgatttattggcttacattactatctatcataattccattgactgtattttctgttcatagaaactggaggagagtgtaaaagttggaaatgggaaagttaagtagtcacatgtggaggttgaatcagataatctataccaagtacttttggggttatgttcttttttggatattgatttgtttaggattatggtattggttagaaggaaatgatagacttgttatagaaattttaaaagggcctaatctgagtcaaaactcttttttagtcttatctatatggttgcttcattggtttattattcatacattttttctagcagttgtatatcgtagaagagcatccgatttctttatggaagtgattcgattttcttctattaagctctggattaggtatcagatttggacctgttttctttatggactcattttaatcatggtaaaagttctagtgattcaatttatgttacagttaccaaactgggatataggagttttgtttatagttgattctttgaatgcttgtgtgttagtcttgttttgctttatgttatacgcactaggagcgaatgtacaaatgaactttgcttgcgttagtttctttttactcatgattgtgtttggtggtctatttgtaggaaatcgaactaattatctattttatattttgaatcgagggaatggagatataggacgagatttatttcttcagttgctatttttagtctttctttttcaaagcattttctatttcactcgtcaaaagaggaggtttatagaatgaatgaaataattacattaaaaaatattgagttgaaattaaaaaagacatgtgtttttcaaaaccttaactttagttgtaaacagggggaaattataggaattactggtgcgaatggctcagggaaaagtgtattgtttaaattaatagctggtttatatagtccgtcttatggagaagtgttaatcaatggggaaaatattgttcctgagagaaaaattccagctaatttgggagctttgattgaagaacctggttttataaattattatagtggctttaagaatttacaatatttggcaagcatacgaggagtagttggtaatcaggaaatcaatgatacactgaaaatagttggtctatatgagcaaaaagaccagaaagttaaaacttattcgctaggtatgaggaaaaagctagggattgctcaagcaattatggagaatccctctattcttttactagatgaacctatgaatgccttggataaatcaagtgtagaaaatatgagaacattgtttagaaagctctctagtgaaaaagggacaacaattttgattgctagtcatagtgaagaggatattcgtatcttatgtgataaagtatatgcaatagaagataaagtatgtacactgtgttcagattgaacatcttagatagactcaggatgttataggtaaaatcttaaaaagggattggagcttaaaatccagttccttttaagagttaatgactaatcaacttttccaccttcaacaaccaggtcatctgctttagcagcgtcaccgtaggttgggtgaagtgtcttttcataggccttgtggaagaagttttccttgcctaatttttcaatatctttattgatgaagtctagcaattcttggttgcctttttgaactgctgccgcaatggtatcgggatcaccgagggaagtaattcctacttcaaatcctttattttcaagcgcccaagctagaacttccgtattgtcagttgaaaaggcatctccacgtccgtcaagaagagcttggtaagagtcactgtattggtcgtatttttggagtttgatttctggatgattcttttcaaaataagtctcagcagtcgttccttttgtgacaattaaggttttaccttcaagttgtttgacgtctgtaatgagaccagtcttaggtgatacgacacccagagaaactttcatatatggaagggcaaaatcaacttgtttcttacgttcgtcagttactgtaaagttagcaagagtaatatctaccttgtttgaaatcaagtattccgcacggttggcagcatcgactgaaatgtatttaaccttgacaccaaggtcttgagctagttggttccctagttcaatatcgtagcgtagccttggtaagaaccatcattgtcaacgtagccaaacggttttttatctccaaacacggcgattcgcagttcaccgctttttttgatttcatcgatagtgcgagctttggcagttgtttttccagaggatgaaccagcgtttccacctgagctacaagcagtgataaagataagggcaaaggcaagtgctaaaacagttaagagtggtttgaatagtttcataagaatctcctttatagatatgagccgaattggctaaagtcaaagacgtttaaaaattcctgggctcgtttggtttgcggattggtaaagaaggcttgagctgttccttcttcagcgattttcccttggtcgaggaagataatccggtcagtaatggcttgggcaaactgcatttcgtgggttactaaaatcatggtacggccttcttgggccaaatcattgataagttccagcacctcacgcaccatttctggatccagcgaagcagtcacctcgtcaaaaaggatgatttctggatgcattaggagggcacggacaattgcaacacgttgcttctgtccaccagataattgacgggcaaagctatgttgtttatccagcaaaccgacacgctctagtaattgcaaagcttcttccgttacttctttcttgtcccttccttgagctttgatagggcctaggatgaggttttgtaagacatccagatggggaaagagttcataactttgaaagaccatgccaatcttttggcgaactaggtgaaaatcttttttattttcaacgatagactgaccatccagaagaatatctccaccttgaatactttctaagccgttgaggcaacgaaggagggtacttttcccacaaccagatggccctaggatgacaacaacttccccttttttgatttctagagaaagtccttggaggatgggattgtctccgaaggatttttttagttccttgatttctaagatagtttcagacatttagtttctccaatgtttttctaagtgagtggatagtttggaaatagggtagcaaactgcgaaatataagattagaatggttccataaatccaaaatgaagcagttgggatggtcaggcgattgctatcgatgatttgttgtccaactttggtcacttccacaaccccaatcaaaacaactaatgaagtggttttaatcatccgagtgacaagattgatagcctgcggtagcagtcttcttaagacttgtgggatgatgatgtggtagtaaagttgaacattagtcaagccgagtgcctgtccactttcaaactgatgtttagggagagaagtgatagctccacgtaccaagtctcccatttcagctgttccccagagggtaaaaacgataatagctgaagtctcacctgagatattgatattaaagtttcgagccaagccaaagtaaacgatgaagagtagcaccagctggggcatgatacggataaattccagatacaatcgtgttaaaaatcgtatgattctagaatgggaggtcatgatgattcccatgactgttctgaacatcatggataagaggacagacaggatggatatcccaatcgtaacgcccaatccctgtaagattctcaggagattatttccttgaaagagtacttggattcccgaatcctgcatggcggagcctcctttctatccagctaaagaccagtgagatgggtagcagcatgattagataagcaactaccaacatagctagcgcaatgtctgtctcatagtagagaccaatcaaatccttggcgacgtacatgaggtcggccaaagccactgctgagaaaacagaggtttccttgataaggaaaatgacattggcactaaaggaggggagtgccaccgctgttgcttgcggaagaaccacatagtaaaagacctgtagaggtgtcagaccaatagcgaggccaatctcctgctgggtttgactgatggcttccagcccacttcggaaagattctgccatataggagcctcctaaaaagacaagcccaagcgttgcacagacttctgaagataggacaatcccgattcggggaagaccgaagtagagaaagaagagttgaatcaaaaggggcgtattacgtgacaattcaatgtaggctgtcgctacttgcgccaaaacaaggattcgataatgtcggatgatactaacgattaaaccgagcagaaaggatcccaaaattccccaaactgcaatatgcaaggtcagaaagaatgccttttgatatagtggtagatattgttcaacaatggatcaatccaaaaatagaacctcccatctagaaataatacagttattgtagcacttaaaatcttctttggataatatctattttttattgccgttataaggatttttatcatagacataaaatttctgaaatttccaaacaaaatattttaaaagttttgaaaaagagttaagatatttttgtaatacacaaagtaaacgcttacttattaaggaggacattttatgtcatacaaaacaagcaatgcagaaggtcatgtagatttcatcaatacctatgatttggagccaatggcgcaacaagttattcctaaagcagcatttggctatatcgctagtggggcgggagatactttcacttctttccagtgattttagcgtcaggttctttttagtttttaaagattatccgtgaatttcttgcttatttatgataaaatgggagtgtcgcaaaaaatgactcatcgtattcaattttgagtaaaactaggaggatcccatgtctacagaacatatggaagaactaaatgaccagcagatcgttcgccgtgaaaaaatggctgcgctccgcgaacaaggaatcgatcctttcggaaaacgttttgaacgtactgcaaattcacaagaattaaaagataaatatgccaacctcgataaagaacaattacacgataaaaacgaaacagctactatcgcaggacgcttgataaccaaacgtggtaaaggaaaagttggttttgcccaccttcaagaccgcgaaggccagattcagatctacgttcgtaaggatgctgtcggtgaagaaaactacgaaatcttcaaaaaagcagaccttggtgacttccttggtgtcgaaggtgaagtgatgcgtacggatatgggagaactctctatcaaggcaacccacatcacacacttgtctaaggctcttcgtcctcttcctgagaaattccatggtttgacagacgttgaaacaatttaccgtaaacgttaccttgacttgatttctaatcgtgaaagctttgaacgctttgtcactcgttcaaaaatcatctctgaaatccgtcgttaccttgaccaaaaaggattccttgaagtggaaacacctgttcttcataatgaagccggtggtgctgctgcccgtccatttatcacccaccacaatgcccaaaacattgacatggtgcttcgtatcgcgactgagcttcacttaaaacgccttatcgtgggtggtatggaacgtgtctatgaaattggccgtatcttccgtaacgaaggaatggacgctactcataaccctgagttcacttctatcgaagtttaccaagcttatgcagacttccaagacatcatggacttgactgaaggcattatccaacacgctgctaaatcagtcaaaggtgatggcccagtcaactaccaaggtactgaaatcaagattaacgaaccatttaagcgtgttcatatggtggatgctatcagagaaattactggtgtcgatttctggcaagacatgactttggaagaagctaaagctatcgctgctgagaagaaagttccagttgagaaacactacactgaggttggtcacatcatcaatgccttctttgaagagtttgttgaagaaactttaatccaaccaacctttgtctatggacatccagtagctgtatctccactcgctaagaaaaatcctgaagaccaacgctttactgaccgtttcgagctctttatcatgactaaggagtacggtaatgcctttactgagttgaacgacccaatcgaccaacttagccgttttgaagcccaagctaaagccaaagaacttggtgatgatgaagcgacaggaatcgactatgactacattgaagctcttgaatacggtatgccaccaacaggtggtttgggaatcggtatcgaccgtctctgcatgctcctcactgatacaacaactatccgtgatgtattgctcttcccaacaatgaaataaattcttatcctctgggtcttatcagaggattttttgattcaaaaagagactgaatttaaggagaaaatgaagtgtagtatattgaaattgaaatagtacactttgatttctaagacattgttagaaattggtttaaattccctaagcaatttgtgcatgttttatttcattttacgatagtacgctgaaacttttcaaaaagtactagaaattgacttggattccccaattgatttgttcagattcactataaataaaaaattaataagtgggataggaagttagcgtcaactaggatagtatcttgcttaaacagtatatatgggattgatataagtccataggtcctattagaggatgttctggtgtcttattcacttgttttttatagtattagtagatagaatcagcaaataaaaacccaaatcattcatacctctctcaactagatgtaacttacaaaacccctgacctcatgagccactttcttcctcctcatgaggtcagttttactttctgctgttccagtatcgtttttcctcgctagatttcctcaaaagggcagactcctcccttggtgcgtcacacgattttttcatctcgactgttctttaatgcatcattaacgacgcttttcttctaggtggttcataaggaacaggaagattcaggttgacttttctaatcctagaataaagtgctgaaaacaattcggaataggcatagagactagacaatttgaggagctgcttgcgtcctgttcgaacacattttcccaccacgtgaagaaaaagatggcggaagcgtttgattgttaaagtttggaagtcacctccagctagatgtttgagaaaaagatagagattgtaggcgatacagctcatcatcatacgaacttcgtttttgattaaggttgaactatccgttttatcgccaaaaaatccctccttcatctccttgatgaaattctcggcttgaccacgtccacgataaagctgaaactggtcttggcttgttccactcgtcatatttgtaacgagagaaataacatcgtagaacaagtttccttcttttcgttcagagaactggcagacacgacgcttgtgcgaccaagatcctgcttgatagagagtttctgagtaggcggagtggggcaagatggttaagtcctcatcctgtgggcaagggagggaaaggtctccaagacggctcagaacagtatttttcttgagttttatgaggtagtattgccctgttttttcaattaaatcgtataattttggggtcgcaaagccactatccattcgaaagagaagttgattaaaccgttctaaaacaggtgtgataaagctgtctgcctcttcagaacaataacgattaccaggacgaagctgggcattgaaacaataacctgtcttcccctcgaaagcataaagaggatgatagccatgagcacgatagtgggcgttataagcaacaccttcttgcttgccataagttgtgaaatgggtagaatcgatatctacaatgagttggtttagctggtgaaactgtaaaaagaattcgaccaattcaaggttgaggcatcgcaaactatggactgtttcctcgtcagttctggaaagaaaacgggataaggttggctgtgaagcaagctgccctccttccaacaattttggaaagtaggcatcagctgacaattctttacaagcatagtccgttccataacctgttaacagttgaaagaggaactggacaaggatatctgaatccgaataacgacagtagcggcgttggtcattcgttactaaatacttagaaatccgctcttttagtttcaactgggaaaaaagttcctgaaaaaagataagaccaccatactgggttaaatgacctccatcgaaagatagttggtaaaaagacttgttttggaagtgatgatttggtaaactgttcatgtgagtttcctttctttttgtgtttttttctacacttataccataaaggggaaactcttttttgtctagtaaaaaacacccattgggtgaaaaaagaaaccatccaggatctaagctaaggcaaggattctggatggtttttagatttggggtgaataattggggaaaaagtagttcaaatgcctggcagcaaaaaatctcaacgattcacttaatatagactaaggtttagagtttaaggaaagtagggctagtatattgtatgaaaaaataagatggtttttaagcaaaactcttgaaaatgattgaaaaaagagttattatagttgtatagtaaaaagcaaacgcttacttaatcgaggaggacagtttatgtcatacaaaacaagcaatgcagaaggtcatgtagacttcatcaatacctatgatttggagccaatggcgcaacaagttattcctaaagcagcatttggctatatcgctagtggggcggaagatactttcactttaagagagaatatccgtgcctttaaccacaagctcatcgttcctcatacactttgcaatgtagaaaatccaagtacagagattgaatttgcaggtgaaaaactatcttctccaatcattatggcacctgttgcggctcataaattggcaaatgaacagggggaagtggcgactgcgcgtggtgtgcatgagtttggttctctttatacaaccagttcttactctactgttgaccttccagagatttctgaagccctccaagggacacctcattggtttcaattttactttagtaaggatgacggtatcaaccgccacatcatggaccgtgtgaaggctgaaggttataaagcgattgtcttgacggcagatgctactgtaggggggaatcgtgaagtggataagcgtaatggttttgtcttcccagttggcatgccgattgttgaagaatacctgccagaaggtgctggtaaatcaatggactttgtttacaaatcagctaaacaacgcttgtctccacgcgatgtagaatttatcgctgaatactctggtcttcctgtgtatgtcaagggaccacaatgccgtgaggacgttgaacgttcgcttgctgcaggagcttctggtatctgggtaaccaaccacggtggtcgtcaaatcgacggtggaccagctgcctttgactcgcttcaagaagtggcagaagcagttgatagacgtgtgccgattgtctttgactctggtgttcgtcgtggtcaacacgtctttaaagccttggcatcaggagcagacttggttgctattggacgccctgtcatctatggcttggctctcggtggtagtgtcggtgtgcgtcaagtctttgaacacttgaatgcggaattgaagacagttatgcaattgtctggaactcagaccattgaagatgtcaaacacttcaagctccgtcacaatccatacaacccaaccttcccagttgaccctcgtgacttaaaattgtattgataaaacagattgcctccactgaatgtggaggtttttcttcgtgtattggaagaataaattgctatcgaaaactatagtaaaatgaaataagaataggacaaatcaatcaggacagtcaaatcgatttctaacaatgttttataagtagaggtgtactattctagtttcaatatattatatataaagatatttttcggtcaaatatcttgctagggctttcattttttgctatactggttcagtagttaaataatagagacatttggggtgctttaggctgagataatacccattgaacctgatacagttaagactggcgaagggaaatgtgaacagttttttcgtatggtgaaatgaacggtctaatcttgtaagtcaactctaattcttgattgtaattggagttttttgtttatataaactggataggcttgtttagttagctctctgcaaatgctctcgatgtgctttaaaaggatcaagtggaattacgattttgcttgatatttcttggtgttttattaattactaacaagtaaagagaggagaagtaaatatggaaacacaagactatgcatttcagccaggtttgactgttggagaattattaaaaagcagtcagaaggattggcaggctgcaatcaatcatcgttttgttaaggaactttttgcggggacaattgagaataaggtcttaaaggactatctgattcaagattatcacttctttgatgccttcttatccatgctgggtgcctgcgtagctcacgcagataaacttgaatccaagcttcgttttgccaagcaactaggctttcttgaagcagatgaagatggttatttccaaaaggcttttaaagagttaaaagtagcagagaatgactatctagaagtgactttgcaccctgtaacaaaagcctttcaggatctaatgtattcggcggtggcttcatcagactatgcccatcttttggtcatgctggtcattgcagaaggtctctatttagactggggttctaaagatttggctttacctgaagtctatattcattcggaatggatcaatctccacagaggtcctttctttgcagagtgggttcaatttctggttgacgaactcaatcgtgtcggtaaaaatcgagaagatttgacagaacttcagcaacgctggaatcaagcagtcgctttagaattagctttttttgatattggttacgatgtctagagaaggctcatgatatttacaaatttgatgaggtaagactcttcgaaaatctcttcaaaccacgtcagttctatccacaacctcaaaacagtgttttgagcaacctgcggttagcctcctagtttgctctttgattttcattgagtataaatcattcaatgtaaatgaaaaaaattctcaactaaagataaatcgaaattagtagatcgtataaagtgaaaaggaaggatttcaatatgacaagtttaaaattattaaaagaaaaagcaccattggtcatttgtataaccaatgatgtagtaaaaaatttcacagcaaatggattagtagcactgggcgcctcaccagccatgagtgagtttccagcagatttagaggatttgttaaagtatgctggtggtttattaataaacataggaacattgacagatgaaaattggaaattataccaagctgctctgaaaattgcagagaaatataatgtcccagcagttttagatcctgtagcctgtggagcaggagaatatagaaaaaaagtagcagatgatctaatcaacaattataaactagcagcgattagaggaaatgctggcgagattgcctctttagtaggaatagatgtggcatctaaaggagtagatagtgcgggcgtagataatattgacgaaattgctctagcagcaaatgagaagttcaatattccaatagtagtaacaggtgaagtggatgccattgctgttaatggagaagtggtaatgattcataatggtagtgctatgatgccgaaagtcattgggacaggatgcttattaggagctgtagtagcaagctttatcggactagaaaaaggtcaagaattgaaatcattaaaaacagcagtgttggtttacaatatcgctggagaaatagcagaaaaacgtccaaatggacatcttcctgggacatttaaagttgaatttataaatgccttatacgagattacagatgaagatgtaaaggaattcaaaagagtgaagtaagatgtttcataaagaattactaaaactatattttatttgtggaacgactacttgccaaggaaaaaatctatatacagtcgttgaggaagccttaaaaggtggtataaccttatttcaatttcgagaaaaaggtgagggtgctttagaaggcttagaaaaacttgagctagctatccaaattaaagaactttgtaaaaaatacaatgttccatttatcgttaatgacgatatagatttagcaatggaaattgacgccgatggcgtacatgtaggtcaagatgatattggtgttgatgaaattagaaaattgatgccagataaaataattggtctttctataagaaacgaagaagaatttcaacaatcaaaagttgaatatgtagattatgtaggtgttgggcctgtatttggtacccagtcaaaggatgatgctggtggtactataggttatgaaggtcttgaattgatgagaaaactattgccacaaatgcctttagttgcaattggtgggatacagacgaaacatattaaagacattataaagaccaatatggatggcgtttcaatcatttcggcaatatcgtatgcaaaaaatatagaaaaaactgttcgggaaatgagtgaacaatagatatctatccttggattctaagtaagtaggattttccttttttaaaaagctatgtccagattcagcttgaatggctaattcatcaaacaggtcatttgttttttgcaaaagaaagatctgctgtctttgtgagtgcaaggctgtatttccagttcaatttcttgaactagtataaaatgtgtgttataataatcacataattaaataataaagacatttggggtgctttaggctgagatgatacccattgaacctgatacagttaagactggcgaagggaaatgtgaaatgtttttttcgtatgtcgaaaagaactgtctaatcttgtaagctgaactctaatttgtatctgtaattagagttttttcttttacgaaactggatgaagatgatatagtagattgaaataagatgcgaacaaatcaattagaaaattcaaattaatttctagaaatattttagtgttcttgtgtactgttctaaattcagtctgctatacaaagtatttaggtcggtcttcttgagtgcctcacttttctttaaaaaaaggagttttttatgttgaaaaaatggcagttaaaagatgttatcttgcttgctttcttgtctatcttttttggtggggttttcgttggttcaggatatgtgtataatattctcagtctactcttaacacctcttggtttgcaggcctttgccaatgaaatcctcttcggtctctggtgtatggctgcgcccattgctgccatctttgttccgagagtcggaagtgcaacgattggagaagtgctagctgcgcttgctgaagtcctttatggtagccaatttggtctaggagctcttttgtctggctttgttcaaggtttgggaagtgaatttggttttatcgtaactaagaatcgctatgaaagttggctctctctaactgctaatagtattgggattacgcttgttagctttgtctatgaatacattaagttaggttactacgccttttcccttccgtttgtcctttccttgcttgtggtacgttttatttctgtttatttcttctgtaccatcttggttcgtgccattgtcaaactctatcatcagtttgcaactggaggaaaagcatagatgggtctggaactacgagcgattcagtccccaatcttctctgagccgtttgattttacttttcatgcgcaagcctttaccttgttagttgggagtagtgggtctggaaaatccagcctctttcaaatgattgcccaagttagttctcttccctatagcggtcaagtcctgatagatgggagcgaggtcagtcagctttctatcgtcgaacgtgtccagacggttggtattctcttgcaaaatcctaatcatcaatttaccatggagagcttgtttgaggagttggtttttaccatggaaaatatcggctatcaccttcaggaaattgattctaaaatagcagaggttgtccagcaatgtcgttgcaaggacatcttgcaccgtctcatccatcacttatcaggtggggaaaagcaaaaagcagcgctggctgtcctctttgccatgaatcctagggtctatctcttggatgagcccttcgcttccattgaccgcaagagcagaatcgagatattggagattctaaaagagttggtctatgatgggaagacagttattttgtgcgaccatgatttatctgactataaagcctatatcgaccatatggtggagctaagagacggaaaactaagggaagtgtttcaaatcccttcctatgagatgacacaggttgcttcaaaggaagttgcttctagcccggaactattccatatgaaccgtgtgactggtgagcttggtaatcgccccctcttttcaattgctgatttcacattctatcaagggatttcctgtatcctgggtgacaatggtgtcgggaaatcaaccctctttcggtctattcttcaatttcaaaagtataaggggagcattacttggaagggttcggtcctgaaaaagaaaaagagtttgtatcgtgatctgactggtgttgttcaggaagctgagaagcagtttatccgagtcagtctgcgagaggagcttcaattagatggacctgattctgaaagaaatcagcggatttttcaagctttacgatattttgatttggagcaggcagtcgataagagtccctatcaattaagtggtggtcagcaaaaaattcttcagctcctgaccatcttgaccagtaaggcttccgtgatcttgctagatgaaccttttgcaggtttggatgatagagcctgccattatttttgcaagtggattgtggaggagaggaatcaaggaagaagttttctgctcattagtcatcgtttagaccctttgatttctgtggttgattattggattgagatgactagtcagggtcttcggcatgtgaaagaagtgaccattaccaaaccacttacatctcagagtagcaatacccaaggggaggtgagatagtatggtcaaagtagcaacccagacaccgattatcagtctcttcttgctgattttatccttggaaacatctttcattccttcgattgctctgactctttcggtagtcgcattttgtattctctttatgctctattaccgtcgatttaaaatgttagcttggatgatcatacttgccattttaccatcttttgccaactactgggcagttcagttacacggagatgcttcacaggcagtcatgcttggaacgagggcctttgtgacagtttgtatcggccttgtctttgtttcctctgtttcactaaaagagcttctcttgtacttggctcaaaaggggctatcacgctcttggtcctatgccttgattgtggtattcaattcttttcctctcattcagcaagaaatcaagtccctcaaagaagcttgcctattacgtggtcaagaactacatttttggtcgcccttgatttacagtaaggttctgatgacagtctttaggtggcgccatctttacctgagagctctatctgctcacggatatgacgaacatgcacagttgaagaatagctatcggactttttatattcctaaaaaaacaaaattaatctacctgcttttctttttattgcttcaaaccagtctatttttataaaggagttattatggaatttacagatattgcgatggaattatccaagaaagcttggcaggcttcctttcatcatccctttattttacaattacaagaggggaatttagaacctgccattttccgctattacctgattcaggatgcctactatctgaaggctttctcagaaatctatcatcttttggctgataagacttcaaaccaagagatgaaaagactcttgaaacaaaatgctcagggtttagtggagggtgagttatttattcgccaacaatttttcaaggaattggaaatcagcgaccaggaaatggagcaacatccaatcgctccaacctgttatcattacatttctcatatttataggcaatttgcagaaccgaacttagccatcgcttttgcaagcttgcttccttgtccttggttataccatgatataggcaaatcacttaatcttaaaccatcaccaaatcctctctatcaacaatggattgaaacttatattacggatgagttagagcaacagatcagagaggagggagcactggtcaatcagctctatcgagaaagtgacgagacagacaagcaaaaaatgctagatgccttccacatcagtgttcatatggaagccaagttttgggaaatggcctaccaacaccagacatggaagagcgatttacagtctttagaaaaaggagaagaatagaagcatgagaaagcaccaattacaagttcacaaattaaccattttatctatgatgattgcccttgatgtagtccttacacctatctttcgaattgagggaatggcaccgatgtccagtgtagtcaatattctagcaggaatcatgatgggacctgtttatgccttggctatggctacagtcacagcctttatccgtatgacgactcaagggattccgcctttagctctcacaggagcgacttttggagcccttctagcaggtctcttttataagtacggtcgaaaatttcactattctgctctaggagagattttgggaacaggtattattggttccattgtttcctatcctgttatggtactctttacaggatcagctgctaagcttagctggtttatctacacgcctcgatttttcggagcaaccttgattggtacagcgatttcctttattgcctttcgatttttaatcaagcaggaattctttaaaaaagtgcagggatatttctttagtgaaaggatagactgatgcaggaatttacaaatccctttcctataggctctagttccctcattcactgcattaccaatgagatttcttgtgagatgctggcaaatgggattttggctctgggatgcaaacctgtcatggcagatgattcccgtgaagttcttgattttactaagcaaagtcaggctctcttcatcaatttggggcatttgtcagctgagaaggaaaaagcaatccgcatggcagcttcgtatgcaaaccaatcttctctcccgatggtagtagatgcggttggcgtaacgacttcatccattcgtaagagcttagttaaagaccttttagactatagacctacggtccttaaaggaaacatgtcagaaattcgaagtcttgttggattaaagcaccacggcgttggggtcgatgcgagtgctaaagatcaagaaacggaggatttgcttcaagtcttgaaagactggtgtcagacctatcctggtatgtctttcttagtcacaggtcccaaggacctcgtcgtttcgaaaaatcaggtcgctgtactgggaaatggctgtactgaattagactggataacagggacaggagacttggttggagccttaacagctgtttttctcagccaaggaaagactggttttgaagcttcttgcttagcagtctcttatctcaatatcgctgctgagaaaatagttgttcaaggaatgggattggaagaatttcgttaccaagtactcaatcagctttcgctcctaagaagagatgaaaattggctagataccatcaaaggagaggtttatgaatagagaagcacttagactatatctggtaaccaatcgctatcaagattccgtggaaagctttcttgcaaaagttgagacggcctgccgttcaggggttaccatagtccaattgcgagaaaaaaatctcacaaccaatcaatattatcaactggcaaaacaagtcaaggaaataacagatgcttatcaggtacccttgataatcgatgatcggttggatgtttgtcttgcggttgatgcagcaggtctgcatatcggagatgatgaattaccagtttcggtagctcgcaaagtcttgggtcctgaaaaaatcctcggtgtcaccgctaaaacggttaaaagagctctggaagcggagaaatcaggtgcagattacttgggtacaggagccattttcccaaccaccaccaaggaaaatgcgcccattactctgatatcgaccttgaaaacaatttgccaaacggttgccattccagtagttgctattggaggcttgacttcggagaatattgatcagcttatgggcactggcatagctggtgtagctgttgtacgtgatttgatgcaagcagaagatattgaggcaaaaacgcaagcctttttaaaaaagttgcataacattctttcctaattaatactcaatgaaaatcaaagagtaaactagaaagctagtcgcaggttgctcaaagtactgccttgaggttttagataagactgacgaagtcagctcaaaacagtgttttgaggctgcagatggaagctgacgtagtttgaagagattttcgaagagtataaaaactctctaattcccttaaagtgggaactagagagttttttttcttaatctttaaaagttgtatggttgactggaccagaaccatgaccgagttgaggggcatcttgaatagcttttgtgataaaggccttggccttatcaactgcctggtaaagactcttgcccttggctagttcagcagtaatcactgcagcaaaggtacatccagtaccatgggtgtgacaggtttgaattcgtgggctttcccagacaaattgttcattcttggtaaagaggaaatctttagcaccacctttgagatgtccgcctttgataaccacagactgaggaccaaattcttttaaaatcaggcgaccagcacgctgcatgtcttcggggtcatggattgaaaaaccaacaatctcttctgcttcaggaagatttggcgtaataatagttgctagaggtagtaagtttgttttgagatagtctctagcatttgagtcaatcaaggcatctccacttgtagcaaccataacaggatcaaggacatagggacaatccagttttttaagatagggttggatgatttccatgatttcagtagtagccaacattccagtttttacagcctgaggtggaatatcagaaaagacactctccaattgggctttcaacatttgaggagaaacgtgctcgattagctgaacacctctggtattttgagcgacaagactggttacaacagccattccatagacatctctcgcttggaatgactttaaatctgccataatgccagcaccaccactagggtcagtccctgcaatggtcaaagcaacgggtaaataagtcatctaaaacctcccaaccaactgaagtttgtattcttaagaacaagctagtctgttttagaaaggcaatagaagactgctagtccccattatcatttccacttccatcagctagcattacctagattgagtcagagggatctaacagtcgttaatctcagctttacgcacccctagtggttgttttcttttttctttagtatagcatatttttattgtttatatagtaatatttgactgcaaatcgtttttcaaatgattaaaattctatttttcgaagaaaatattatttctataattgacaaatgtagattttaagagtatactgatgagtgtaattgacaaatgtagattttggaggtatggtaatgcagatttcagatgcagaatggcaggtcatgaagattatttggatgcagggggagcagaccagtacagatttgattagggttttggcagagcggtttgactggtccaagtccacggttcagacacttttggctcgtctggttgataaagagtgtttgactcggaaaaaagaaggcaagtcctttgtttattcagcccttttaactctagaccaaagtcgggatttacttgtccaagatatcaaagacaaggtttgttcccgtaggattaggaatttgttggctgacttgattgtagaatgtgaatttactcagactgacttggaagacttggaagctgtgatttcagagaagaaatcaagtgctgtaacagaagtaagatgtaattgtatgtaaaggagacgtcatgttaaatagtattgtaaccattatttgtattgcccttatcgcgtttatcttgttttggtttttcaaaaagcctgaaaaatctggacaaaaagcccagcaaaaaaacggataccaagagattcgagtggaagtcatgggaggctatactcctgagttgattgtcctcaagaaatcagtgccagcacgcattgtctttgaccgcaaggatccttcaccatgtctggatcaaattgtttttccagattttggtgtacatgcgaacctgccaatgggggaagagtatgtagtggaaatcacgcctgaacaggctggagagtttggctttgcttgtggtatgaacatgatgcacggcaagatgattgtagagtaggtggagactatgacagaaattgtgaaagcaagcttagaaaatggcattcaaaaaatccgtatccgagctgaaaaaggctatcatccagcccatatccagcttcaaaagggaattccagctgagattacctttcatcgtgctactccttcaaactgttataaggaaattctgtttgaagaagaaggtatcttggaaccaatcggcgtagatgaggagaaagtcattcgttttacgcctcaagaattagggcgacatgaattttcttgtggcatgaagatgcaaaagggaagctatacagtcgttgagaagactcgaaaatctctatctctcctgcaacgtttttggattactagtatctttactgtgcctcttgtgattctcatgattgggatgttgacaggtagcattagtcatcaagtcatgcattggggaacctttctagcaacaacgcctattatgttagttgcaggtaagccatatatccagagtgcttgggccagttttaaaaagcacaatgccaacatggataccttggttgcgctgggaactctagtggcttatttctatagcctagttgctctctttgctggtctccctgtttacttcgaaagtgctggatttatcctctttttcgttcttttgggagcagtttttgaggaaaaaatgagaaaaaatacgtcccaagctgtggagaaattactggacttgcaagctaaaaccgcagaagtcttgagtgatgatagttatgtccaagttcctttggaacaagtcaaggtaggcgacctgattcgagtgcgtcccggtgaaaagattgctgttgatggtgtcgtagtagaaggtgtctctagtattgacgaatccatggtgacaggtgagagtctgcctgtggacaagacagttggagatactgtcattggctcaaccatcaatcatagtggaacgcttgtctttagagcagaaaaagttggctcagagactgttttggctcagattgtggattttgtgaagaaagctcagacaagtcgtgcgccgattcaggacttgacggataagatttcagggatttttgtcccagtagttgtcattttaggaatcatgaccttttgggtttggttcgtcttgctcagggatagtgtggttgtgcttggagctagctttgtgtcctctcttctctacggagtggcggttttgattatcgcctgtccttgtgccttgggacttgcaacaccgacagcccttatggtggggacaggacgtagtgccaagatgggggttctcctcaaaaatggaactgtcttacaggaaatccagaaagttcaaacccttgtctttgataagaccgggactttgacggaagggaaacctgtggtaacagatgtcatcggcgacgaagtagaagtgtttgggttggcagcctccttggaagatgcttctcaacacccactggctgaggctatcgttaagcgagcgagtgaagctggacttgagtttcaaactgttgaaaattttcagtccttgcacgggaaaggtgtttcagggcgaatcaatggaaaacaagttttacttggaaatgctaaaatgctggatggcatggatatttctaatacttatcaagataaactagaagaactagaaaaagaagctaagacagttgtgttcttagctgttgacaatgaaatcaaaggcttgcttgctttgcaagatattcctaaggaaaatgctaagctagccatcagtcagctaaaaaaacgtggtctccgaacagtcatgctgacaggagacaatgctggtgtggcgcgtgctattgcagatcaaatcggaattgaagaggtcattgcaggcgtcttgccagaagaaaaagcccatgaaatccataaactgcaacagtcagggaaagtagcctttgttggggacggtatcaatgacgctcctgcccttagtgtagcagatgtggggattgctatgggagctggaacagatatcgccatcgagtcagcagatttggtgttgacaaccaataatcttttaggagtggttcgtgcctttgatatgagtaagaaaacctttcatcgaattctactcaatcttttctgggcttttatctacaatgttgtcggaattccgattgcagcaggagtcttttcaggtgttggactggctctcaacccagaattggcaggtctagccatggcctttagttctgtatctgttctgaccagttcccttctgttaaattttagtaaaatagactaaaagtaatgactagatttctttgttataaaacagaaatgacagaactttcaaaactgtattagaatagagaatagagagttttgagcagatttttagaaaagtcagcataaatatgatacagtggaatagtaaaaatttggagaacgtttccaattctatgtaatcgtattctccaagtttaaaaaaattgaaggagagttatcattatgactcaagggaaaattactgcatctgcagcaatgcttaacgtattgaaaacatggggcgtagatacaatctacggtatcccatcaggaacactcagctcattgatggacgctttggctgaagacaaagatatccgtttcttacaagttcgccacgaagagacaggtgctcttgcagcggttatgcaagctaaattcggcggctcaatcggggttgcagttggttcaggtggtccaggtgcgactcacttgattaacggtgtttacgatgcagctatggataacactccattcctagcgatccttggatcacgtccagttaacgaattgaacatggatgctttccaagagcttaaccaaaacccaatgtacaacggtatcgctgtttacaacaaacgtgtagcttacgctgagcaattgccaaaagtaattgacgaagcctgccgtgctgcagtttctaaaaaaggtccagctgttgttgaaattccagtaaacttcggtttccaagaaatcgatgaaaactcatactacggttcaggttcatacgaacgctcattcatcgctcctgctttgaacgaagttgaaatcgacaaagctgttgaaatcttgaacaatgctgaacgcccagttatctatgctggatttggtggtgttaaagctggtgaagtgattactgaattgtcacgtaaaatcaaagcaccaatcatcacaactggtaaaaactttgaagctttcgaatggaactatgaaggtttgacaggttctgcttaccgtgttggttggaaaccagccaacgaagtggtctttgaagcagacacagttcttttccttggttcaaacttcccatttgctgaagtttacgaagcattcaagaacactgaaaaattcatccaagtcgatatcgacccttacaaacttggtaaacgtcatgcccttgacgcttcaatccttggtgatgctggtcaagcagctaaagctatccttgacaaagtaaacccagttgaatcaactccatggtggcgtgcaaacgttaagaacaaccaaaactggcgtgattacatgaacaaactcgaaggtaaaactgagggtgaattgcaattgtatcaagtttacaatgcaatcaacaaacatgctgatcaagacgctatctactcaatcgacgtaggtaacactactcaaacatctactcgtcaccttcacatgacacctaagaacatgtggcgtacatctccactctttgcgacaatgggtattgcccttcctggtggtatcgctgctaagaaagacaatccagatcgccaagtatggaacatcatgggtgacggagcattcaacatgtgctacccagacgttatcacaaacgttcaatacgaccttccagttatcaaccttgtcttctcaaatgctgagtacggcttcatcaagaacaaatacgaagatacaaacaaacacttgtttggtgtagacttcacaaacgctgactacgctaaaattgcggaagctcaaggagctgttggattcacagttgaccgtatcgaagacatcgatgcagttgttgcagaagctgttaaattgaacaaagaaggtaaaactgttgtcatcgatgctcgcatcactcaacaccgtccacttccagtagaagtacttgaattggatccaaaacttcactcagaagaagctatcaaagccttcaaggaaaaatacgaagcagaagaactcgtaccattccgtctcttcttggaagaagaaggattgcaatcacgcgcaattaaataattcctctcgccgaaaatcaaatatgaaacttgtagactttattctttgattttcatagagcagaactttaaaagatcggagcaatccggtctttttatggaggagagtaaatgaatttaaatcaattagatattatcgtttcaaatgttccccaagtctgtgctgacttggagcatatcttggataaaaaggcagattatgctaatgatggttttgctcagtttacgattggtagtcactgccttatgttgtcacaaaatcatttggttcctttggaaaactttcagtcaggaatcattattcatatcgaggttgaggatgtagaccagaactacaaacggttgaacgagcttggtataaaggttttacacggaccaactgtaaccgattggggaacagagtccttattagttcaaggacctgctggtctagtgcttgatttttatcgtatgaaataggtcgcgtagtcatttgacgttaaccttagctatttttaaaatagaaattgagaatatgaactattgaaagatcggagcaatccggtctttttatataaagaaattgcatataatactcatctgctttcaaaaagcattctagtccatctccgattaacgatggactttatcacctccttctccaatccttgtatgacatcttggagttgattcatgacatcttccaaaattcgaaaggctttattcttaaatccacgtttacgaatctctttccacacttgttcaatggggttcatctctggtgtgtatggaggaataaatgcaaaaccaatattagtcggaatctttaaggtacttgatttatgccatatagcattgtccataacgagtaaaaggataagcttgtgaaagctcttctaaaaaggcgttcatccactcagtattacatctaccagctattaagaaaaatgattcgcctgtataggcatcaacagctccataacaatagcgaaattctcgtatatagtgactatggatatgtggacctactcctattggagcccaacaagatcccagtttactgattctaccgaaaccagcttcagcttggtacatcaagcaaaccttacgaaaacgtctactatatttaaaacgctttcttgccttcttggattgagattttatttttagacgcaacaatggtttgagcgtctgctttcttaggatgttctggacgtggcgtaatatttcgccaaccatggcgcttcaacagttgatagaaggcatcacgtgtgtaggaacgacctaactcctttttataagcctgaaataaggcatcaattgtaacaaattctcctgcctctgtagccttcaaatggcgggcaagaaaggctttctcttcctcaactgtcatatatgcatggttacgaccaccacgtgtttcttgaaggagagagtcgagtccgaactcctcatatttttttacatttcgccaaatcgttgtttgattacagtctatagtgtattgaatctataacagtacaccttggctgctaaaatatttctataaattaatttgactttcctgatagagttgttcacatcttatttcaaactactataaaagttctataatctctttataagatttgcccatcagacgaaatatagtagattgaaactagaatagtacacccctacttctaaaacattgttagaaatcgatttgactgtcctgatcgatttgtactgttcttatttcattttactatagaacgatttgaaggcgtttatgatatttagctgtacgagagtcttttaaaagtgttttgatggtttggatttcttctttagttgatttcatatcactattatataatgctttttgattttagtttagtattatcgtagaaaatggactcggtgctatggatacaccggatgagaatggttatgtagcagatgactatcggattacttacttagaggcccacatcaaggccatgcgagatgccatttaccaagacggggttgacttgcttggttatacgacttggggctgtatcgatccggtttcagctggcacaggggaaatgaataagcgctatggctttatctatgtagatcgagataatgtaggaaacggagctctcaaacgtagcaagaagaagtccttctattggtacaaggatgtcatttatagcaatggtgcaagcatcgggtagagcacatttgtttactatttttataaaatcttctccctgctttataagatgtaaaaaagagttcaattcgaactctttttttgctataatgaggggagaaaaatcagacaggagatcgacatgtcagaaccattatttttacaatcagttatgcaagaaaaaatctggggtggagccaagctacgtgatgagtttggctacgacatcccaagtgaaaaaatcggagaatattgggccatctcagcccatccaaatggagtctctaaagttgccaatggtcgttacgagggaacagatcttgctactttgtatgcggaacaccgtgaattatttggcaatcgtccagaacctgtatttccacttttgaccaagatcctcgatgccaacgactggctcagtgtccaagttcacccagacgatgcttatggactcgagcatgaaggcgaactcggaaaaacagaatgctggtacattatcgcagcggatgaaggttcagagattatctacggtcacaatgccaagtcaaaagaagaactccgccagcaaatcgaggacaagaactgggatgacttgttgaccaaagtccctgttaaggctggagatttcttctatgtaccaagcgggactatgcacgctatcggggcgggtatcttaatccttgaaacccagcagtctagcgataccacctatcgcgtctatgactttgaccgcaaggatgacaaaggcaacttgcgtgaacttcatcttgaaaaatccatcgatgtcttgaacattggtgagccagcaaatagccgtcctgtaactgttaaagcagatgatttgcgttccactctccttgtatctaatgatttcttcgcagtttacaagtgggaaattactggaaaagttgactttgaaaagacagctgactacagcttattgagtgtcttggctggtcaaggtcagctaactgttgacgggaaaaattatccaattcaaaaaggcagccactttatcctaccaagtgatgttgaagcttggactctggaagggcaaggtttggaattgattgttagccatccataaaaagaaagggcctgagttcactactcaagtcctttttgattacataaattgggcaatgaagaccacaatgatgatgattggaatgacgaaacgaagaaacgaagaaggaagagccagacttggaacagtccttgtttccatgctctttcatcgagatggagttcctccattgcaagagcctttttaaagatatagcctgtaaaaagtgaaaggtagagagctccaaatggcatgaggagattggaaaccaagaagtccatagcgtcaaagaaggtcttaccaaaaatgtgaacatccgccatgacaccgtaagatagggctgaaggaatgccaaagacaaaggtcaaaattcctaaaataacactccatttggcacgtttgctgttatcctggttggtgatattgtctacattgatttccagcatcacgacagaaaaagtgactgtcgcaaaaaggaagagcaagaggaagaggacgtagaaaatggttccaaaaggcatcttgtcaaagagttgaggcaagacgataaagagcaggctgggtcccccttcagactggatattgaagggggatcgagcttggaaaatggctagacctgccatgatggatatcgagatattcatggctacgatggagattcctgactggactagattggttttcttgtctaagtaagaagcataggtcaacatgactgtaacccctagtgagagggcaaagaaagattgtcccagagcatagaggagaccagtgctagtcagttttgaaaagtctggtttgaggaagtaaagaaccccttccatggcatttggcaaactgagagagcgaccgatgataaaaacaaagacgataaagagcaggggcatcatgactttcgaagctctttcaatccctttttgaaccccacgtgatacaatgaagatattcaataggataaaggccgcttgagctcctagggcaatggctggatttgaaatgattgaagtaaataactgagcataatcacccgttccaccaagttggaacaatttcccaaactcaatacctagatagactagaatccatcctccgataacactgtaaaaagataagaggataaagagggcaaaggcgccaatccaaccgataaagttgtacttgttattcttgcccagttttccaaaggttttgatagcggaaacgccagcactacggccaagggcaaactcagccagcaggagagggaaaccgattaaaatagtggaaatgagaaagattagtaaaaagcctccaccgccattagcagcagtcatgtagggaaacttccaaacggaaccaagcccgatggccagccagcagatgctagaataaaaccaagtttcgacccccattgtgatttttctgacatagttaaactctgatctcctttttcaaaataagaaaaagctacttgagttgtcaaatagccttctgtttgattgatagacttgactatcctatcatgttttctaaggtctgtcaagaaaatcattttcaagttttcacacctttctcaaaaaagttaaaaaattttctcaaaaacgcttgactctgacctaaggcgaggggttatactatcattgtaaggaggaaatcatgtaccatataaaagaagctgcgcagctttcaggtgtctctgtcaagaccctgcatcactatgacaagataggactcttggtccccttaaagtcggaaaacggctatcgaacctacagtcaagaggatttggaacgccttcaggtcattctttactacaaatatctaggcttttctttagagaaaatagcagagctgttaaaggaagaaaggacagatttattgccccatttgactaggcagttggactatctaactcgcgaaaggcaacatctggataccttgatttccaccttgcaaaaaactattcaagaacaaaaaggagaaagaaaaatgaccattgaggaaaaattcacgggatttagctatcaagacaatcaaaaataccaccaagaagcggtagagaaatatggtcaagaagtcatgggacaagcgctcgaacgccaaaaaggtcacgaagacgaggctacggccgcctttaaccaagtctttcaaactttggcacaaaatcttcaagttggtttacctgcaacagcaaccgaaaaccaggagcaagcagccaagctcttgcaagccattcgcacttatggatttgactgctctattgaggtattcggtcatatcggtaaaggttacgtctacaacccagagtttaaggaaaacattgacaagtttggttctgaaacagcccagtacacgtcagatgccattgcggtttacgttcagacaaatgcagaataaataggctaggaatttcctagcctattttttacttcaaatcataaagccagtcgtcaccgtttttgtagtaaaagaattcactgagatcttcttctagaaacacacgaagcatatcagacatatcatcggttgcaagttttagatgagaaagattttcaaagtcctcccaccaaactttcccttcgtctgaagactggagttcaccagtaaagtgttctgtcttgtaaaaaaggacgacataacgataatccttgtcgtcataccagtttttgataccacagagttggggtttggaaatgatcagaccagtttcttctttcacttcacgaatgacagcatcgacaaaggattcgccacgttcaacatgaccaccaggaaaagtaatgccagaccagtcgggattaactcggtcttggaccaggaccttatctccgtttttaatcatacacatgttaacaaattcgactgcctctcttctgttcattcttcacaacctttaatctttaatcataatgcagacttcccgccacccagccggtacagagggcagaagtgatgttaaagccacccgtgtgggcattgatatccataacttcgcctgcaaagtggaggccaggtaccagcttactttcaagggttttaggattgatttccttgagactgactccacccttggtaacaaaggactttgcaagggacatttttccagttacaggaattttaagttctttaatggactggacaagttgttctcgttccttttcagtcagttgtttgactttttcaggatatccttgtacaaaaaattcggccaagcgttctggtaacaaggtttttaaagcgtttttcaaggatttttcccgattttcttctagaaatgtaaccaagtccttctcagaaagttgaggcaaaacatcgagtgagagaacctccccacctttgacaaagctagacatgcgtagggcagcaggacctgacaaaccaaagtgggtaaagagtaaatcatgagtgatgacatgcttaccataacttagggtcacatcgtccagagaaataccttgtaaggctttatgtggaaaatctgttaataaaggactttcagcagcctcaagatcggtgatggtatgcttaaaatggcgagcaatctcgtgaccaaaaccagtcgaaccagtcgaaggataagacttaccacctgttgtgacaatgagtttctcacaagtgaaggtttgatccgctgacttaaggacaaactggtcatctacttttttaacagaaacgatttctatttgagtagcaacttgaccacctagttcggtgattttcttttccaaagcttcgataatagtccgagacttgtcactggctggaaagacgcgtccgtggtcttcgaccttaagtttaacaccattttctgtaaaaaagttgatgatgtcatgattatcgaactgggagaaaacactgtaaagaaagcgtccgtttccaggaattccagctagcaggttgtctaagctaccattgttggtcacattgcaacgtcccccaccagtcccagctaatttttttccaagtttccgatttttttcgatgaggagggttttctgtccataaaagctactggaaatcgtagccatcataccagcaggtcccccaccgatgacaatagtatcaaaatgtttcatagctctattgtaccacaaaaaaacaagagatgatggtcacctcttgtcaagaatgcaattaatcaatttcatagcccatcagcaaaccgccctcttctgcatagaaactgcagagaccagaggttggtagaattttaatatccgcttgtgggaaggtttcacggattcgctctgagagctgttgacaacatttttcgttattgcgttgggccatgacaatacggccaccagcatatccagcttttactaactcatcataggcagcttgaactgatttctttgatccccttgctttttgtagcaattcgagagtcccagtttcactagcttttccgaccatacgaatgttgagaaggccaacgaccgtaccgataagcttgctcaaacggccgttcttcaccaagttatcgactttggctaggacaaagagcaacttagttttttcttgataggcggtgatagcttcaaccacttcttcaaaagacaagccctggtcaatcaagtcattcaatttttctacgagtaggtcaacttcaccaccagcagataaactatcaatcacatgaatcttagtgtcaggatggtcttccagataaatattctttgctagttgagcactattgtgactgccagaaagggtacctgtgatggttactaggaaaatgtttttggcaccttcaaatgctcgcaaatagtcatctgggcttggacaagccgattttgaagcttctgcagttgcatacatggtttccatcatttggtcaatatcgagactggcgtcatcaacaaagacctgatcagctacttgaatggttaaggggacacttacaaaggttgtgttaatagctggtgttggcagttgacgataatcacaaccagagtcagcaataatcttccaagtcatagaaattctccatctttgtcagttatacattgacaaaggttctgtctttttttacaattatatcatgaaaacccttgaaacaaaagcatcatccgtctgttgtgacaagtagaaagaaaatgttatgtctgaacgtagaatctctgaaaagtctcttgaaaatctcagaaaatcaaaccaagaatccaatttattaaccagagaagccattgaaacagccctcttgcaactcttggaaaaaaaggaactgaccaagattagtatttctgaattggtcaaacgtgcaggtgtttcgcgtgcggccttttatcgcaattatgactccaaagaggaaattttagagagcgtctttaaacgaactgtccacaatattatggaacagctgcatcattacgatttaaagacagacctttatttggtttgggttcaccttttccgggaggccagaaaggaagctagagtaattcaattggccttggattaccatctggaaaaaatctttgtccaagccatgcaggaatttctagaaaaataccatgggaaatcaaaaggtgtcagctcttatcttcattccttctggagctcagccatcgtctctgtccttctaaaatggatcaaggatggcatgaaggtaccagctgaaaagattgcagatttaggtttaccattttttaaaaaatagagaaaaaggagaaaagagatgactgaaaaaagactggcctgggatgagtattttgcagcccaagctctactaattgcgaatcgttccacttgtaaacgtgctaaagtgggcgcgattctggtaaaagataataaggttatttccactggttacaatggttcggtgtcagggactgagcattgtattgatcacgaatgtttggtcattgaaggccactgcgttcgcacccttcacgctgaggtcaatgctatccttcaaggtgctgagcgtggtgttcccaaaggctttacagcctatgtaacccattttccttgtctcaactgtacaaaacaattgcttcaggtcggctgcaagcgcgtggtttatatcaaccagtaccgaatggacgactacgcccaatacctttatcaagaaaaagggacagaattgacccatttaccacttgagacagtacagacagctcttaaagaggctgatctaatgtaaaaattatcaaaaataaatggtttagaaagatttttaaaccgttttttggtataataagaagaataaattgaaagaaggaattccaaaaatgggaaaaattgaagttattaatcacccactgattcaacacaaattgtcaatcttgcgtcgtacagatacttctacaaaagcttttcgtgagctagtagatgagattgcaatgttgatggggtatgaagtacttcgtgatcttccactagaagatgtggaaatcgaaacaccaattacaaaaacagttcaaaaacaattggcaggtaagaaattggccatcgtcccaatcttgcgtgcaggtatcgggatggttgatggtctcttgaacttggttccagctgctaaagttggccacatcggtatgtaccgtgatgaagaaacacttcaaccagttgaatacttggtgaaattgcctgaggacattgaccaacgtcaaatttttgtagtagacccaatgttggcaacaggtggctcagcaatcttggctgttgattctcttaaaaaacgtggcgcatcaaatatcaaatttgtctgccttgtatctgctccagagggtgtaaaagcccttcaagaagctcatccagatgtagaaatctttacagcagccttggatgaacgtttgaacgaacacggttatatcgttccaggtcttggagatgctggagaccgcttgttcggtacaaaataagatcgaaaagaagaatgacttggaaaagtatttccagtcacgaaaggaggttgggtttttgtttctgtctaatgaaagcagagcaaaaatttgaccttttttgaccaagatattataatagtcttatcttcagtcatttgaccaacaaaattaaaactcaaaaggagaaatgaatgattcctgtagttattgaacaaacaagccgtggagaacgttcttacgatatttactcacgtcttctcaaagaccgcatcattatgctgacaggtccggttgaagacaatatggctaactctgttattgcccaattgcttttcttggatgcccaagatagtacaaaagatatttacctttatgtcaatacaccaggtggttctgtttcagctggtttggcaatcgtagataccatgaactttatcaaggcagatgtccaaaccattgttatgggaatggctgcatctatggggactgtcatcgcatcaagtggagcaaaaggcaaacgtttcatgcttccaaatgctgaatacatgattcaccaaccaatgggtggtacaggtggtggtacccaacaaactgatatggctatcgctgcagaacacttgctcaaaactcgtaataccttggaaaaaatcttggctgaaaattcaggtcagtcaatggaaaaagtccatgcagatgcagaacgtgataactggatgagcgcccaggaaacacttgaatatggctttattgatgaaattatggccaacaattcattgaactaatgatgatagaaggcaaactcgactgggtttgctttttttggtataatagggagagatttcttagaaagaggatttatcatgtttgaaaaagtcaatcgctctggcttgattatctatctttactataatcgtgatgccaaaaaactgcaggattatggagatattacctatcattccaagaaacatcgttacttacaactctatgttccaactcaagaagtggagcaattggtcggacgcttgagcaaggaaaaatttattaaaaaagttagggtttgtcatatccaagagttggaaacaccctttgtgggcaatctttatcgataggaaaacgttatcatcgaaaaagttcaaggaaaacattgacaattttctgataattcggtatattcttaacagactatttaagaaataaggagacaaaaagatgaagaaaaaatttgccctatcgtttgtggcgcttgcaagtgtagcacttcttgcagcctgtggagaagtgaagtctggagcagtcaacactgctggtaactcagtagaggaaaagacaattaaaatcgggtttaactttgaagaatcaggttctttagctgcatacggaacagctgaacaaaaaggtgcccaattggctgttgatgaaatcaatgccgcagtggtatcgatggaaaacaaatcgaagtagtcgataaagataataagtctgaaacagctgaggctgcttcagttacaactaaccttgtaacccaatctaaagtatcagcagtcgtaggacctgcgacatctggtgcgactgcagctgcggtagcgaacgctacaaaagcaggtgttccattgatctcaccaagtgcgactcaagatggattgactaaaggtcaagattacctctttattggaactttccaagatagcttccaaggaaaaattatctcaaactatgtttctgaaaaattaaatgctaagaaagttgttctttacactgacaatgccagtgactatgctaaagggattgcaaaatctttccgcgagtcatacaagggtgaaatcgttgcagatgaaactttcgtagcaggtgacacagacttccaagcagcccttacaaaaatgaaagggaaagactttgatgctatcgttgttcctggttactataatgaggctggtaaaattgtaaaccaagcgcgtggcatgggaattgacaaaccaatcgttggtggtgatggattcaacggtgaggagtttgtacaacaagcaactgctgaaaaagcatcaaacatctactttatctcaggcttctcaactactgtagaagtttcagctaaagctaaagccttccttgacgcttaccgtgctaagtacaatgaagagccttcaacatttgcagccttggcttatgattcagttcaccttgtagcaaacgcagcaaaaggtgctaaaaattcaggtgaaatcaagaataaccttgctaaaacaaaagattttgaaggtgtaactggtcaaacaagcttcgatgcagaccacaacacagtcaaaactgcttacatgatgaccatgaacaatggtaaagttgaagcagcagaagttgtaaaaccataatagaaaaatgttgaaatagggaatgagcctttgactcactccctgtttcgatatttaatactcttcgaaaatctcttcaaactgcgtcaacgtcgccttggattatatatgtgactgacttcgtcagtcttatctacaacctcaaagcagtgctttgagcaacctgcggctagtttcctagtttgctctttgattttcattgagtataagaacctatcaaaaagtgagggaaaaccctcggaattataaatagaaagagtgaatcttatgctccaacaactcgtaaatggtttgattctaggtagtgtttacgcgctgttagccctaggatataccatggtttacggaattatcaagctcatcaacttcgcccatggtgatatttatatgatgggagcctttatcggttatttcttgatcaattctttccaaatgaatttctttgtagcgcttattgtagctatgctagcgacagctattcttggtgtcgtgattgagtttcttgcttaccgacctttgcgccactctactcgtattgctgttttgattacggctattggggtttctttcctattggagtatggaatggtctatctggttggtgccaatacccgtgccttccctcaagcgattcaaacagttcgatatgatttgggaccaattagcttaacaaatgtgcagttaatgattttggccatttccttgattttgatgattttgttacaagtcattgtccaaaagactaagatggggaaagccatgcgtgcagtatcagtagatagcgacgcggcgcaattgatggggatcaatgtaaaccgtacgattagctttaccttcgctttgggttctgctcttgcgggtgcggctggtgttctgattgctctttattataactctcttgagcctttgatgggggttactccaggtcttaaatctttcgttgccgcagtacttggtggtatcggaattattcctggtgcggctcttggtggctttgtgattggtctattggaaacctttgcgactgcctttgggatgtcagatttccgtgatgccattgtttatggaatcttgttgttgatcttgattgtccgcccagctggtatccttggtaagaatgtgaaagagaaggtgtaaacgatgaaggaaaatttaaaagttaatattctatggttactccttttgttagctggctatagcttgattagtgtactggtttcagtcggagtacttaatctattctatgtacagattttacaacaaattggaattaatattattttggctgttggtctcaacttaatcgttggtttttcaggacaattttcacttggtcatgctggtttcatggcgattggtgcctatgcagcagctattattggttctaaatcaccaacctacggtgccttctttggagctatgcttgtaggggctttgctttcaggagcagttgccttacttgtcggcattccaaccttgcgcttgaagggggactatcttgcggtagcaactctgggtgtttctgaaattatccgtatctttatcatcaatggtggaagccttacaaatggtgcggcaggtatcttagggattcctaactttacaacttggcaaatggtttacttctttgtcgtgattacaaccattgcaaccttgaacttcttgcgtagcccaattggtcgttcaaccctctctgttcgtgaagatgaaatcgctgctgagtcagttggggttaatacgactaaaattaaaatcatcgcttttgtctttggtgccattactgcaagtattgctgggtcacttcaggcaggatttatcgggtctgttgtaccgaaagattacaccttcatcaactcaatcaacgttttgattattgttgtatttggtggactcggttccattacaggtgcgattgtttcggctattgttctgggaattttgaatatgcttctccaagatgttgctagtgtgcgtatgattatttacgctttggccttggtattggtaatgattttcagaccaggtggactccttggaacatgggaactgagcctatcacgtttctttaaaaaatctaagaaggaggaacaaaactaatggcattacttgaagtaaaacagttaaccaaacattttggtggtctaacagctgttggagatgtgactcttgaattgaacgaaggggaactggttggattaatcggtccaaacggagctgggaaaaccacccttttcaaccttttgaccggtgtttatgaaccaagcgagggaacagtaaccctagatggtcaccttttgaatgggaaatcaccttataagattgcctctttgggacttggacgtactttccaaaatatccgtctctttaaagatttaacagttttagataatgttttgattgcttttggaaaccatcacaaacagcatgtttttactagtttcttacgcttaccagctttttacaagagtgaaaaagaattaaaggctaaagctttggaattgttgaaaatctttgatttagatggtgatgcagagactcttgctaaaaatctttcctacggacaacaacgtcgtttggaaattgttcgtgcccttgctacggaacctaaaattctcttcttagatgaaccagcagcaggtatgaacccacaggaaacagccgaattgactgagttaattcgtcgtatcaaagatgagtttaagattacaatcatgttgattgaacacgatatgaatctggtcatggaagtaacagaacgtatctacgtacttgaatatggccgtttaatcgctcaaggaactccagacgaaattaagaccaataaacgcgttatcgaagcttatctaggaggtgaagcctaatgtctatgttaaaagttgaaaatctttctgtgcattacggtatgatccaagcagttcgtgatgtaagctttgaagttaatgaaggagaagttgtttcccttatcggtgccaacggtgcaggtaagacaactattcttcgcaccttgtcaggtttggttcgaccaagttcaggaaagattgaatttttaggtcaagaaatccaaaaaatgccagctcagaaaatcgtggcaagtggtctttcacaagttccagaaggacgccacgtctttcctggcttgactgttatggaaaatcttgaaatgggagctttcttaaagaaaaatcgtgaagaaaatcaagctaacttgaagaaggttttctcacgctttcctcgtcttgaagaacggaagaaccaagatgcagccactctttcagggggggaacaacaaatgcttgccatgggacgcgccctcatgtcaacaccaaaacttcttcttttagatgaaccatcaatgggacttgccccaatctttatccaagaaatttttgatatcattcaagatattcagaagcaaggaacaacggtcctcttgattgaacaaaatgccaataaagcacttgcaatctctgaccgaggatatgtactggaaacagggagaatcgtcctatcaggaacaggaaaagaactcgcttcatcagaagaagtcagaaaagcatatctaggtggctaaaacaatccagtggattgttttagtcggcagatggagattacgaagtaatcatcaatatagtccgggggacctttttagtcggtagattgagattgcaaacaaatctgcatctacattgaaagcttaatttctaataattgaaaaaatcgaatgaaaaatttcttaccttcattcacagagctcgatttcagagctctttttgctagcttattcatacttttctgaatttcgaaaaagaaatgtaagcgtttgatagatttacaaaaagattgtataatagggataagaatagaaaaggagaagtctcatggcagttaaagattttatgacccgcaaggtagtttatattagtccagatataacagtatctcatgcagcagatttgatgagagagcaaggtttgcaccgtctgcctgttatcgaaaatgatcaattagttggtttggtgactgagggaaccattgcacaagcaagtccatctaaagcaacaagtctttctatctatgagatgaattatcttctgaataagacaaaagtaaaagatgtcatgattcgcgatgttgtcactgtctcaggctatgctagtctagaagatgcaacttatctgatgttgaaaaataagattagtattctccctgtcgtagataaccatcaagtatacggagttattactgaccgtgacgttttccaagcctttcttgaaattgcaggttatggcgaagaagggattcgtgtacgctttgttacagaagatgaagttggtgttcttggaaaaattgtttctttgattgtagaagaaaatttgaatatctcccatacagtcaatattccgcgtaaggatggtaaggtgattatcgaagtgcaaatcgatggatcaattgatttaccagccttgaaagaaaaatttgaagcaaatggtattcaagtggaagaaatcgctcgcacttcagcaaaagtcttgtaagaagggaagcccaaaggcttcttttttcatgaaaaggggattagagcaaaagatggaaagaaatgataaaatatgctataatgaaataatgtaaaaaaggagtatttatggacatttcagtaattcgtcagaaaattgacgcaaatcgtgaaaaattagcttctttcagggggtctctttgacctcgaagggctagaggaagagattgccatcttggaaaacaagatgacagaacctgatttttggaacgataatattgcggcccaaaaaacgtcgcaagaattaaatgaattaaaaaacacttacaataccttccataagatggaagagttgcaggatgaagtcgaaattttattggattttttggctgaagacgagtcagtgcatgatgaactggtagcgcagttagccgaacttgataagataatgaccagctacgagatgactctactcttgtcagaaccttatgaccacaacaatgccatcttggaaatccatccaggttctggtggtactgaggcgcaggactggggtgatatgttgcttcgtatgtatactcgttatggtaatgctaaaggctttaaagtggaagtgttggattaccaagcaggtgatgaggctggtattaagtcggtaactttatcatttgaagggcctaatgcctatggtctcctcaagtcagaaatgggtgttcaccgcttagtgcgaatctcaccatttgactctgccaaacgtcgccatacctctttcacatctgtagaagtgatgccagaattggatgatactattgaagtggaaatccgtgaagatgatatcaagatggataccttccgttcaggtggtgccggtggacaaaacgtcaataaggtttcaacaggtgtacgtttaacccacattccaactggaattgttgtccaatcaacagtagatcgtacccagtatggaaatagagatcgtgccatgaagatgttgcaggctaagctctatcaaatggagcaagataagaaggctgcggaggtagattctctcaaaggtgagaaaaaggagatcacttggggaagccaaatccgttcttatgtcttcacgccttatactatggtaaaagatcaccgaactagctttgaggttgctcaggtagataaggttatggatggggacctagatggttttatcgatgcttatctcaagtggcgaattagctaagatagaaaggaactcacatgtcaattattgaaatgagagatgtcgttaaaaaatacgacaacggaacaactgctctacgcggtgtttcggttagcgttcaaccgggggaatttgcttacatcgtaggaccttcaggagcagggaagtcaacttttattcgttctctgtatcgtgaagtaaaaatcgataaaggaagcctatcagttgctggttttaatctggttaagatcaaaaagaaagatgtcccgcttctacgtcgtagtgttggggttgtcttccaggattataaattgttaccaaagaaaactgtctatgaaaatattgcttacgctatggaagtaatcggggaaaatcgccgtaatatcaaaagacgagtgatggaagttttggacttggttggattgaagcataaggttcgttctttcccaaatgaactctcaggtggggagcaacagcggattgcgattgcgcgtgcaattgtaaataatcccaaagtattgatagctgatgagccaacaggaaatctggatccggataattcatgggaaattatgaatctcttggaacggattaacctacaaggaacaactattttgatggcgactcataatagccagattgtaaataccttgcgccaccgtgtcattgccattgaaaatggccgtgtcgttcgtgacgaatcaaaaggagagtatggatacgatgattagtagattttttcgccatttatttgaagccttaaaaagtttgaaacgaaatggttggatgacagtagctgctgtcagttcagtcatgattactttgaccttggtggcaatatttgcatctgttattttcaatacagcgaaactagctacagatattgaaaataatgtccgtgtagtagtttatatccgaaaggatgtggaagataatagtcagacaattgaaaaagaaggtcaaactgttacaaataatgactaccacaaggtatatgattctttgaagaacatgtctacggttaaaagtgttaccttttcaagtaaagaagaacaatatgaaaaattaaccgagataatgggagataactggaaaatctttgaaggagatgccaatcctctctatgatgcctatattgtagaggcaaacactccaaatgatgtaaaaactatagccgaagatgctaaaaaaattgaaggtgtctctgaggttcaagatggcggtgccaatacagaaagactcttcaagttagcttcatttatccgtgtttggggactagggattgctgctttgttaatttttatcgcagttttcttgatttcaaataccattcgtattaccattatttcccgcagtcgcgaaattcaaatcatgcgcttggtcggagctaaaaacagttatatccgtggaccgttcttgttagaaggagcctttatcggtttattgggagctatcgcaccatctgttttggtctttattgtttatcaaattgtttaccaatctgtcaacaaatcgttggtagggcaaaatctatccatgattagtccagatttatttagtccgttgatgattgccctactatttgtgattggggttttcattggttcattgggatcaggaatatccatgcgccgattcttgaagatttaggtaaaatagctgcttttatgaggagattgtaaaatctccttttttgctacaagagtttttgaaaagagatgcgcagaagaaaagagcttccaaagaagtcccccagagaagacttcttgatggctaatttgaacttgaaatttggcgcactagaaattttttagaaaaaagtgtaatttttttataaaagcctttacaaaaaaaattaaagtggtataattaaatcatagaaagtgcaaacgttttcgtaaaacgtttgcctaaataaaaataaaggagatttgaatgatgaaagatacattcaaaaatgtcttgtctttcgaattttggcaaaaattcggtaaggctttgatggtagttatcgcggttatgccggctgctggtttgatgatttcaatcggtaagtctatcgtgatgattaacccaacctttgcaccacttgtcatcacaggtggaattcttgagcaaatcggttggggggttatcggtaaccttcacattttgtttgccctagccattggaggaagctgggctaaagaacgtgctggtggtgctttcgccgctggtcttgccttcatcttgattaaccgtatcactggtacaatctttggtgtatcaggcgatatgttgaaaaatccagatgctatggtaactactttctttggtggttcaatcaaagttgctgattactttatcagtgttcttgaagctccagccttgaacatgggggtattcgtagggattatctcaggttttgtaggggcaactgcttacaacaaatactacaacttccgtaaacttcctgatgcactttcattcttcaacgggaaacgtttcgtaccatttgtagttattcttcgttcagcaatcgctgcaattctacttgctgctttctggccagtagttcaaacaggtatcaataacttcggtatctggattgccaactcacaagaaactgctccaattcttgcaccattcttgtatggtactttggaacgtttgctcttgccatttggtcttcaccacatgttgactatcccaatgaactacacagctcttggtggtacttatgacattttaactggtgcagctaaaggtactcaagtattcggtcaagacccactatggcttgcatgggtaacagaccttgtaaaccttaaaggtactgatgctagtcaatatcaacacttgttagatacagtacatccagctcgtttcaaagttggacaaatgatcggttcattcggtatcttgatgggtgtgattgttgctatctaccgtaatgttgatgctgacaagaaacataaatacaaaggtatgatgattgcaacagctcttgcaacattcttgacaggggttactgaaccaatcgaatacatgttcatgttcatcgcaacacctatgtatcttgtttactcacttgttcaaggtgctgccttcgctatggctgacgtcgtaaacctacgtatgcactcattcggttcaatcgagttcttgactcgtacacctattgcaatcagtgctggtattggtatggatatcgttaacttcgtttgggtaactgttctctttgctgtaatcatgtactttatcgcaaacttcatgattcaaaaattcaactacgcaactccagggcgcaacggaaactacgaaactgctgaaggttcagaagaaaccagcagcgaagtgaaagttgcagcaggctctcaagctgtaaacattatcaaccttcttggtggacgtgtaaacatcgttgatgttgatgcatgtatgactcgtcttcgtgtaactgttaaagatgcagataaagtaggaaatgcagagcaatggaaagcagaaggagctatgggtcttgtcatgaaaggacaaggggttcaagctatctacggtccaaaagctgacattttgaaatctgatatccaagatatccttgattcaggtgaaatcattcctgaaactcttccaagccaaatgactgaagcacaacaaaacactgttcacttcaaagatcttactgaggaagtttactcagtagcagacggtcaagttgttgctttggaacaagtaaaggatccagtatttgctcaaaaaatgatgggtgatggatttgcagtagaacctgcaaatggaaacattgtatctccagtttcaggtactgtgtcaagcatcttcccaacaaaacatgcttttggtattgtgacggaagcaggtcttgaagtattggttcacattggtttggacacagtaagtcttgaaggtaaaccatttacagttcatgttgctgaaggacaaaaagttgcagcaggagatctccttgtcacagctgacttggatgctatccgtgcagcaggacgtgaaacttcaacagtagttgtcttcacaaatggtgatgcaattaaatcagttaagttagaaaaaacaggttctcttgcagctaaaacagcagttgctaaagtagaattgtaatatacttgaggttggaagctgtattccaacctcttattttgggagaaaagaatgaaatttttaacactcaatactcacagttggatggagaaagaagcagaggaaaaattccagattttgcttgaagatattcttgaaaaggactatgatttgatttgttttcaagaaatcaatcaggagatgacctcgtcagaggtggaggttaatgacctttatcaagctttgccagcagctgagcctattcaccaagaccattatgttagactcttggttgaaaagttgtctgagcaagggaaaaattactactggacctgggcctataaccatatcggctataaccgctaccacgaaggtgtggctatcttgtctaaaacacctattgaagccagagaaattttggtttcagatgtggatgatccaacagactatcatactcgccgtgttgccctagctgaaactgtagtcgatggcaaggagctagcagttgccagtgttcatctctcttggtgggataaaggtttccaagaagaatgggcacgatttgaggctgtcttgaaaaaattgaacaagccacttttactagctggagatttcaacaatccggctggacaggaaggttaccaagctattttagctagtccattaggcttacaagacgcatttgaagttgctcaagagaaaagtggtagctatactgttccgcctgaaattgatggctggaaagggaacactgaaccccttcgaatcgattatgtctttactaccaaagagttagcggtggaaaatttacatgtcgtatttgatggtaacaagagtccacaagtgagtgatcactatggcttgaatgctatattaaactggaaataataactgaaaagaggttggaactataaaattccagccttttcttactagagaagctactggaaatagcctaaataagtgagactactgtaatggaataaaatatggtataattgataaggtagatagaatcgaggatgttatgtcatttacgaaatttcaatttaaaaactatattagagaagccttgaaggagttaaaatttacaactccaacagaggtgcaagacaagttgattcctattgttttggcaggtcgtgacctagtaggagaatcaaaaacaggttcaggtaagactcatactttcttgttaccgattttccagcaattagatgaagctagcgatagtgtacaagcagtgattactgcaccgagtcgtgagttggctactcaaatttaccaagtagcgcgtcagatttcagctcactcagatgtcgaagttcgtgtggttaattatgtgggtggtacggataaggctcgccagattgagaaattggcaagcaatcagcctcatattgttattggaacaccaggccgtatctacgacttggttaaatctggtgatttagctattcataaagccaagacatttgttgttgatgaagcagatatgaccttggatatgggattcttggaaactgttgataagattgctggcagtcttccaaaagacttgcaattcatggtcttctcagcgactatcccacaaaaactgcaaccattcttgaaaaaatacttatcaaatcctgttatggagaaaattaagaccaaaacggttatttctgacaccattgataattggttgatttcgaccaagggacatgataagaatgctcaaatttaccagttgactcagttgatgcagccgtatttggcaatgatttttgttaacactaaaacgcgtgctgatgaattgcattcatatctgactgctcaaggcttgaaggttgcaaaaatccatggcgatattgcccctcgtgaacgcaagcgaatcatgaatcaggtgcaaaatctggattttgagtatattgtcgcaacagatttggcagcgcgtgggattgacattgaaggtgtcagccatgtcatcaatgatgccattccgcaagacttatctttttttgttcatcgtgttggtcgtactggacgaaatggcctaccaggtacagctattaccctttatcagccaagtgatgactcggatatccgtgagttggagaaattgggaatcaagtttagtcctaagatggtcaaagacggggaatttcaagatacctatgaccgtgatcgtcgtgccaaccgtgagaaaaaacaagataaacttgatatcgaaatgattggtttggttaaaaagaaaaagaaaaaagtcaaaccgggttataagaagaaaattcaatgggcggttgatgaaaagcgccgtaaaaccaagcgtgctgaaaatcgcgctcgcggtcgtgcagagcgtaaagctaaacgccaaacattttaatagaaattgttggagtattgagctccaacttttttatttatgagaacgaactatctaaaccgaaacactacattaaagactgcaaattgcgattaaaaatggtataatgataaagttatatagtcccgataagatggtaggtatttattacgaagagttttcctatcagtactttgtaactctataacaatattttttaaggggggacatttttatgtcagagcgtaaattattcacgtctgaatctgtatctgaggggcatccggataagattgcagaccaaatttcagatgcgattttggatgctattttagcaaaggatccagaggcgcacgttgctgctgaaacagctgtatatactggttctgtccacgtttttggtgaaatttctacaaatgcctatgtggatattaaccgtgtggttcgtgataccattgcagagattggttataccaatacagaatatggattttctgctgagacggtgggagtacacccatctttggtggaacaatctcctgacatcgctcaaggtgttaacgaagccttggaggttcgtggaaatgctgatcaagatccactggacttgattggagcaggtgaccaagggctcatgtttggatttgcagtagatgaaacagaagagcttatgccattgccaattgcactcagtcataaattggttcgtcgtctggcagaacttcgtaagtctggagaaattagctatctccgtccagatgcaaaatcacaagttacagttgagtacgatgaaaatgaccgtccggtacgtgtagatacagtcgttatttctactcagcatgatccagaggccactaatgaacaaatccatcaagatgtgattgacaaggtcatcaaagaagttattccatcttcttatcttgatgataagacaaaattctttatcaatccgacaggtcgttttgtaatcggtggtcctcaaggggactcaggtttgactggtcgtaagattattgtagatacttatggtggctactctcgtcatggtggtggtgccttctctggtaaagatgcgactaaggtggatcgttcagcctcttatgcggctcgctatattgccaagaatatcgttgcagcagaccttgctaagaaggcagaagtgcagttggcctatgctatcggtgttgcgcaacctgtttctgttcgtatcgatactttcggtacaggaacagtagctgaaagtcaacttgaaaaagcggctcgtcaaatctttgaccttcgccctgcagggattatccaaatgctggacctcaagcgtccaatttaccgtcaaacatcggcttacggtcacatgggacgtacagatattgatcttccatgggaacgtttggataaggtagatgctttgaaagaagcagtaaaataagattttaagaggggaacgtcctctcttttttatagtttttaactatactgggatactgttctgaaaatccattttgcgaaagtagagatttacatgtatagtagattgaaactagaatagtacacctcaacttctaaaacattgttagcaatcaatttgactgtcctgatcgatttctcctgttcttgtttcattttactatatttctttaaaaatgataaaggttaagatttctcctcgtaatagataatcttggggatatttcaatccaaagttttattcgttatcacttgactattgcaaggttttctagagcaacagagtcatggaatggactcatggttgagatttctccttgttgcttggacttcattcaaaagtctgttacccaagccttgttcaaacttctaatacactagctgtttccatagcatgacttctgtactagactttcttttccgaataaatagatagaaccacagaatctagtaaacctagaattaaaattatggtataatattagcaataaaagaaatctggaggattagaatcatggtatcaacgaaaacacaaattgctggttttgagtttgacaattgcttgatgaatgcagcaggtgtggcttgtatgacgatagaggagttagaagaggtcaaaaactcagcggcaggaacctttgttactaagacagcgaccttggacttccgtcaggggaatcctgagccacgctaccaagatgttccacttggttccatcaactctatgggcttgccaaataatggcttagactattatttggattatcttttagatttgcaggaaaaagagtcgaaccgaactttcttcttatctctggtcggcatgtctccagaggaaacccatactattttgaaaaaagtccaagagagtgattttcgtggtctgactgagctaaatctttcctgtccaaatgttccaggtaaacctcagattgcctatgattttgagacaacagaccggattttggcagaagtgtttgcttacttcaccaaacctcttggaattaaattgccaccttattttgatattgttcactttgaccaagcggcagctattttcaacaaatatccgctcaagtttgtcaactgcgttaactctatcggaaacggcctctatatagaagacgaatctgtcgttattcggcctaagaatggttttggtggaattggtggagaatacatcaaaccgactgctttagccaatgttcacgccttttatcaacgtttaaatcctcaaatccaaattatcggaacaggtggcgttctgactggtcgagatgcctttgaacacatcctctgtggagcaagtatggtgcaggtgggaacgacccttcacaaagaaggcgtcagtgcttttgaccgcattaccaatgaactgaaagcaatcatggtggaaaaaggctacgagagcttagaagatttccgtgggaaattgcgctatattgactaaattaaatcgaaaaatctgaagaaaggagagacgatgctagccattgaagaaagtcagaagttgactttatcaaatttaccgagcctgagcctatttacagggacagatcagggtcagtttgaagtgatgaagagtcaaatgttgaaacagattgggtatgattctgctgacctcaactttgcctactttgatatgaaagaagtagtttacaaggatgtggaactggagttggtcagccttcctttctttgcggatgagaaaatcgtgatattagattattttatggatatcacgactgctaagaaacgctttttgacagatgatgagcttaagtcatttgaggaataccttgacaatccttctccaacaaccaagttgataatctttgcagaaggaaagctggatagcaaaagacggttagtcaaattacttaagcgtgatgccaaggccttcgatgcagtagaagtaaaagaacaagaattgcgccagtacttccaaaagtggagtcagaaacaaggtctgcagtttaccaatcattcttttgaaaatctcctcatcaagtcggggtttcaatttagcgaaatccagaaaaatcttctctttttacagtcctataaggcgaattctgttattgaggaagaggatattgttaacgcaattcccaagaccttgcaggacaatatttttgatttaactcagtttattctgactaaaaagatggatcaggcgcgcgatttggtgagagacttgaccttgcaaggggaagatgaaatcaaactgattgcagtcatgctgggacaatttcggacttttactcaggtgaagattttggcggagtctggccaaacagaatcgcagattgcaagtagtttaggtagttatctgggacgtaacccaaatccttatcaaatcaagtttgcattaagagattcgagaggactttctttgagctttttgaagcaagctatttcctatttgattgagacagactatcagattaagacaggtctttatgaaaaaggtttcctttttgaaaaggcactcttacagattgctagtcaggtcaattgacatttgttgaaactacaacccgcgtcaggactatcttgtcgtgggtttcttgctgatttgcttattttattagaaagtatgtcagtgatttccttatctataagcaaaaaacttgaaaaaagtgaatgtttgcgttatcattttcatatagaaagaaaaagaggtattacagatggctattatcttaccagaacttccatatgcatacgacgctttggaaccatacatcgatgcggaaacaatgcatttgcaccatgacaaacaccatcaaacttatgtcaacaatgccaatgcagctttagaaaaacaccctgaaatcggtgaagaccttgaagccttgcttgctgatgtagaatctatcccagctgatatccgtcaagcacttatcaacaatggtggcggacacttgaaccacgctcttttctgggaattgatgactcccgagaaaacagctccttcagcagaactggcagcagcaatcgatgcaacatttggttcatttgaagaattccaagcagccttcactgcagcagcaacaactcgttttggttcaggttgggcatggttggttgtcaacaaagaagggaaacttgaagtgacttcaacagcaaaccaagacacaccaatctcagaaggtaaaaaaccaatcttgggcttggacgtttgggaacatgcttactacgtgaaataccgcaacgtgcgtcctgactacatcaaagctttcttttcagtaatcaactggaataaagtagatgaattgtacgcagctgctaaataatgatagttggagggaagaattgttcttctctttttaggttataagattctggtctgacaaaatcgtcagacttttttcatttttatgagaaacgtgctaactgctagaaattatggtagaataaagtattaagtaatcgtgaaaaaaggatatctatgcgaaaagaaattgcacctgaattatacaactataacaagtttcctggtccggagttccatttacacggggacaaggtcgaaacggaagggatagctttttccttggttgaaaatatcaaggatgcctttgatgtgacgacttttaatcagcgtttttcagaagtattaaccaagtttgattatatcgtgggggactggagcaacgaacagcttcgcctacgaggtttttacaaggatgaccgaacagaagaaaaacttgaaaaaatcagtcgtttacaagactaccttttagagtattgtagttatggttgtgcctattttgtcttagaaaatgaagcccctaagcgagcatcatttgacaagaaaatgcgtaagacggaagaagaaacaccttctagaaaaggaaagaaaccgactcaaactaaacgaaagtcgaatgcagataagaaaaatagacgtcgtcagaaagacgacaagggacaacgtcattttgtcattcgtcagaagtgagtagagaataaggagaagaaatgaaaccctcaattcatagtttggtacatcaaaccatgcaggaatgggtattggagcagggagaaaagaaattccgtgcagatcaaatctgggaatggctctaccgtaaacgtgtgcagtcatttgaagaaatgaccaacctttccaaggatttgattgctaagctcaatgaccagtttgtggtcaatcccttgaaacaacgtattgtgcaagagtctgctgatggtacagtcaaatatctctttgaattgcccgacggtatgttaattgagactgtactcatgcgtcaacactatggtttatctgtctgtgtgaccactcaggtcggctgtaatatcggttgtaccttctgtgcctctggtttgattaagaagcaacgtgacctcaataacggtgaaatcgtagcgcaaatcatgctggttcagaaatactttgatgagcgtggtcaggatgaacgcatcagccatatcgttgtcatgggaatcggtgagccctttgataattacaacaatgtcttgaatttctttcgtactatcaatgatgataaaggaatggctatcggtgctcgtcacatcacggtttcaacctcaggtttggctcataaaattcgtgactttgctgatgaaggggttcaggtcaatcttgccgtgtctcttcacgcacctaacaatgaacttcgttcaagtatcatgaagattaaccgtgcctttccgattgaaaaactctttgctgctattgaatactacattgagacaacaaaccgtcgtgtaacctttgaatatatcatgcttaatgaagtcaacgacggtgtagaacaagccttggaattgactgaattgctcaagaacatcaagaaattgtcttatgtaaacttgattccttataacccagttagtgagcatgaccaatatagccgtagtcccaaagagtgcgtgttggctttctatgatacgcttaagaaaaaaggggtcaactgtgtggttcgtcaagagcatggtacagatattgacgcagcttgtggacaattgcgctctaacacaatgaaacgtgaccgccagaaggcagtcgcagcggtaaatccttaatgatgaagaagacttataatcatattttggtctggggagtcattttctatagcatttgcattgtctgtttttgctttactcctcaagaacaatctaccgtgggagtgggaactccaggtattcagcatcttggacgcctggtttttcttttgactcctttcaattctctctggaaactgggcgaagtgagtgacattggacaattatgttggatttttttacaaaatatcctcaatgtcttcttgttttttcctctgattttccaactcctttatctatttccaaatttgcggaaaacaaaaaaggtccttctttttagttttcttgtgagtcttggaatcgagtgtacgcaattaatcttggactttttctttgatttcaatcgcgtctttgagattgatgatttgtggaccaacactttgggtggctatctggcttggctcctttataaacgattacataaaaacaaggtaaggaattaaaatgagtattttagaagttaaaaatctgagtcacggttttggtgaccgtgcaatttttgaagatgtgtccttccgtctcctcaagggagaacatatcggcctggtcggtgccaatggtgaaggaaaatcaacctttatgagtatcgtgactggtaaaatgctgccagatgaaggaaaggttgagtggtccaaatatgtgacggctggttacttggatcagcactctgtccttgctgaaagacagtcggtgcgtgatgttctccgtacggcttttgatgagcttttcaaagctgaagctcgtatcaatgacctctatatgaaaatggctgaagacggcgcggatgttgatgctctcatggaagaagtaggagaacttcaagaccgtctggagagtcgtgatttctataccttggatgctaagattgacgaagtagcgcgtgctcttggtgttatggactttggcatggatacggatgtaacttctttgtcaggtgggcaaagaaccaaggtgcttttggcaaaacttctccttgaaaagcctgatatcttgctgttggacgagccgaccaactacttggatgctgagcatattgattggctcaagcgctatctccaaaactatgagaatgcctttgttctcatttcgcacgatattccattcctcaatgacgttattaatattgtctatcatgtggaaaatcaacagctgacgcgttactctggtgactactaccagttccaagaagtttatgctatgaagaaatctcagctagaggcagcctacgaacgccagcagaaagagattgcagacctcaaggactttgtggctcgtaataaagcccgtgttgcaactcgtaatatggctatgtctcgtcaaaagaaattggataagatggatattatcgaactccaaagtgagaaaccaaaaccatcctttgatttcaaaccagctcgtacaccagggcgctttatcttccaagccaagaacttgcaaattggttacgaccgtcctcttactaagcctttaaatcttaccttcgaacgcaatcaaaaggttgcgattattggtgctaatggtattggaaaaacaactctcttgaagagtctcttgggcattatctcgccaatcgctggggaagtggagcgtggagattatttagaacttggttattttgagcaggaagtagaaggcggtaatcgccaaactcctcttgaagctgtctggaatgcctttcctgcccttaatcaagcagaagtccgtgcagcccttgcccgttgtggtttgacaaccaaacatattgaaagccagattcaagtattatcagggggagagcaagccaaggttcgtttctgtctcttgatgaatcgtgaaaacaacgttttagtgctggacgagccgaccaaccatttggatgtggatgcaaaggatgagctcaaacgcgctctcaaagaatataggggatctatccttatggtctgccacgagccagacttttatgaaggctggatagaccaaatatgggattttaataatttaacttaagaatgagagtaaaagaaatacagtaccgaatgtggatactgtatttttttggtttttaagatttaaaatcgtagtctttcaccacttcgatgctgtcgattgtgatagcagtagttggcttgtctttttcatctttttcggccttagcaatcttatccacaacatccataccgtcaatcacttgaccaaagactgggtgtttgccatctagactagggtttccaccttctttgtaggcttcaataattttctgtggatacttgcttgtagggagtttagaagaggtatctgtagagttttggttgatgaagaactggctgccattggtgtttggttgaccagtattagccatagcaagagcaccacggatgttatacaaataaggagtaatctcgttcttgaaaccagttcctttgtctttagtcttatccttgtcatgccagatggactgaccacctgtaccgtccccttttggatctccagtttggaccataaagccatcgatgacacggtggaaggtaataccgttatagtagccttctttggcgtgagtgaggaaattttcaaccgctagaggagcgagtttagggaagagtttaatgcgaatatcaccttggcttgtgtggaaaatcacttcggcttcatcttcagcaacttccttagatagttgtgggaaattggcgttttcgtttgttaaagcatcgtttaactccttggcagattgggcagctactttggaactttcttcagcagcaagactggaatcaacataatcatcaccacgcagactgcgttggacgctgctacacccagctagggctacagtagacagtaaaagaagggttgctagttttttcattctgatcctctcaaaaattcatttataaccattgcaccctaaaaggaagtggatttcaaatattagtagtttacagaactggcttagataatagttgggatttcatcatcatcttgaaaatcttcaacttcttccccagtaaatggtttctgaaaagaacttagtataaaacgggcaattggttcaacaattaggaaatttagaggaagagctgcaataaagtttacgaaccaggcgcttagataggtattgggtgtgatagcaatgccattgtaaaaaaagtccatagaaggacatgaaagtgaccagctaattcttcttctgaaaaatgctcatgaagggcttgatccaggtcgcaagatttcattttagaaagtccagtaactcccttcttcttcaggatattctttttcatggtattatttagatggtcaagtgagtcaaaagaagtttcgacaagagcataccctttttctaccagagtttttagatgtttaggggcatcaataccataagtgtactcaaagtattttggaaaccagatcttaagaaagctcgtaaagctagccagttctctaaacgctaagaactagctacaacacagcatttacaacacttcatggttcacaccatggggtgttttttaatgattttaagcaaaattcacacttaattgaaagttatttaaattagatgaaaatttattttttgaaaaagtgggaaaacattgattctaagcgaattttgaatcatattcgaatgggagtttttaaaatcatgtttcagtggtaaaagtaccaaactggattctccatagtaaaatgatatctcctgctagtgaatcatctactaataagtccatatttcgcttgggaacgggcttgggacttagaagccaagtatccaactctcgttcaggcgatatgaagggtttgacttggtgttctttataaaatttttctaaaatagtattcacggatagcatctttcaaacatttatttcctattctaacaaatttctaaatactttaagaaatttatagtctgtcaagtttttttcttgacacatgccagaaatctgctataatagaacatgtgctaaatagctcagctatttcaccgaaataaaaaattaaagaaatgagactttaaaaatggcagttaaaatccgtttgactcgtatgggttctaagaaaaaacctttctaccgtatcaacgtagcagattcacgttcaccacgtgacggacgtttcatcgaaacagttggaacttacaacccacttgttgctgaaaaccaagtaactttgaaagaagaccgcgttcttgcatggttggctaatggagctcaaccttcagacacagtacgtaacatcctttcaaaagaaggcgtattgaaaaaattccacgattctaaattttcaaaataagtttaaagtaggttgacagatggatacgattgaaaatctcattattgcgattgtgaaacccttaatttcacaaccagatgccttaactatcaagattgaggatacaccagaatttttggaatatcatttgaatcttgatcaaagcgatgtgggtcgtgtaatcggtcgtaagggtcgcactatttctgcgataagaacgattgtctactctgtcccaactgaatacaaaaaagtaagaatcgttattgacgaaaaataagaagggcgggacggatgtctcgcttttttgtgtggaatagaagatatagtaaaatgaaacaagaacaggacaaatcgatcaggacagtcaaatcgatttctaacaatgttttagaagtaaaggtgtactattctagtttcaatatactataaaagattgaacgtttaggcaattccaagactacttaatcgaacattaacagcagtctcggactgatgaaggtctctttatgaagttagtggaggaagtcggagaagtagtcgaggttttgaataggcgctctggtcgaaaagaagggataggattcgaacgaggaacttgccagagaactggctgatatcatttactacaccgtcgcaatcgtagctattaatcatattgaccttaccaagactgtctttgagaaagacaaaaccgcagccattaattaccaacataaacataatttggaaggattattgaagggaaagtagagatattgtccccttcctccaacttgagaaaatccttggaacgtgataaaataaaggataaggatttttaataattcattatatagaatcagtggatttctttatgaagaggtttgaagtatctacagaaattggtagcctctctgttacttatcaaaagcaaaagaaagtgctagtttgtttaaacggagcaggtttgctaccaagttatgaaaatttttcacttatacttgaaaaacctcctcctacaattggttatttgacaattgattttccgaacacaggtaggagtccgattcatgaccaagctggaaaaaatctagataatcttgcagatgcggtttatgaagtacttgaagaattaggaatttctgaatatatactttgtgcacatagttggagtggaattttagcttgcaaattactcgagaaaccaattaagcgtcagactttagtagcaattgaaccgacaactaaaaaagtcatgtttgctgatttttcagaaaatccttatccagaaatggaagagcagatgaggctgattgacgagtgtggtcctgaactttattttaagaacttaactcaagcaacatttagtcctgaaacgaataaaaaaatctgggaattaatgcaagaaaaaggcttagagttggaaaatcaagatccagaatttcagatatctggagagattactgaggaagattttgaggatgtatctatagaagctcatattcctgtatttgttttttgtcagccttatagagaaaaagagtacagagaatcagaatattggacttccaatactaaactcattttaggagggaatcaccattatttacaatggtcagaatcggaaaaaattgcggctattattcgagaattgttagaataagatggaaaaaaggagattacaggagacaagatgaactactttaatgttgggaaaatcgttaatacgcagggattacagggggagatgcgagtcttgtctgtgacggattttgcagaagaacggtttaaaaaaggagctgagctggttttgtttgatgaaaaagatcagtttgtccaaacagtgaccatcgctagccaccgtaaacagaagaactttgacattattaaattcaaagatatgtaccatatcaatactatcgaaaagtacaagggatacagtctcaaggtcgctgaggaagatttgaatgacctagacgatggtgaattttactatcacgagattatcggtttggaagtctatgagggtgatagcttggttggaaccatcaaggaaatcctgcaaccaggtgctaatgatgtctgggtggtcaaacgaaaaggcaaacgtgatttgcttttaccttatatcccaccagtggttctcaatgttgatattccaagtaaacgggtcgatgtggaaatcttagaagggttagacgatgaagattgatattttaaccctctttccagagatgttttctccactggagcactcaatcgttggaaaggctcgagaaaaagggctcttggatatccagtatcataattttcgagaaaatgctgaaaaggcccgtcatgtagatgatgagccctacggaggcggtcagggcatgttgctcagagcacaacctattttcgattcctttgatgctattgaaaagaaaaatccgcgcgttattctccttgatcctgctggaaagcagtttgatcaggcttatgctgaagatttggctcaagaggaagagctaatctttatctgtgggcactatgagggttatgatgagcgcattaagaccttggtaacagatgagatttccctaggtgactatgtcctcactggtggagaattggcagctatgaccatgattgatgctacagttcgcctgattccagaagtgattggcaaggagtctagccaccaagatgatagtttttcttcaggtcttttagaatatcctcagtacacacgtccctatgattatcgaggcatggtcgtgccagatgtattgatgagtggccaccatgaaaagattcgtcagtggcgattgtacgagagtttaaagaaaacctacgagcgcagaccggatttacttgaacattatcaactgacagtagaagaagaaaaaatgctggcagaaatcaaagaaaacaaagaataaaggagaaacctatgcaagtaatcaaacgtaatggcgaaattgctgaatttaatccagataagatttaccaagccatcttgaaggcagcccaaactgtttatgttttgacagatgatttgcgtcaaaatcttgctcaagtcactaagaaggtagttttggatttacaagaagccaaggtggaacgtgcgactatcagtatgattcaatctatggttgaacatcgtttattgggcgcaggttacattaccattgcagaacactacatttcctatcgtttacaacgtgacttggaaagaagtggttatggagatcatatcgcagttcatttacattttgaacaaattcgctaagaaaaaagagtgggatgaagcaactacatctcactctttcttaaatctatttttttgggctgtttggacagttgaggggacaaatcgcaggcgttgaatatcgcttatacggataatccggctcacatttttggaaaaatttttcacgataatttgctggccttgctgatcatatttgatgatgtcacctgtaaagcttgtctcagacaagataaggtgaacagcggtttgtttctggatagcctcttcaatagtggctgtaagggagttggtttcagtctggtcaggttggtcatatccatttaaaaaatcatgtattttatttagaacttgctggaatttatgtctcatattggcctcccttcttttatatcaatattatataaaattttcctaaaatctacaagattttacgaataaactaatgaaactaaaaaaggagaagaaaatggcagaatttacatttgaaatcgaagagcacttgttgactctttctgaaaacgaaaaaggttggaccaaggaaattaaccgtgtgagctttaatggtgcccctgcaaagtttgatattcgtgcttggagtccagaccatactaaaatgggcaaagggattactctctcaaatgaagaatttcaaacgatggtggatgcctttaaaggcaactaatactcttcgaaaatctcttcaaaccgcgtcagctttgccttgccgtatgtatggttactgacttcgtcagtttcatccacaacctcaaaacagtgttttgagcagcctgcggctagcttcctagtttgctctttgattttcattgagtataagttttcaaaataaaagaaaaggatattgagtcatgataactcgatatccttttttagttagtaaagtaagcctgatttttaaggcgttgaagtaggggacggctaataaaactaatagctagaagtttgccaaggtctggaatgataaagggaagaacccccacagcaagagctttttcaaatgccattccagctaggaaatgcaagctgagaatcccgccgacaaagacaagggcatcacccaagaggtttgcaagaaaaatcttaacaacaccactcttgctgttggttagagaggaagtaagtccagagtaaacgagataaaaccaaagatagcctgcagtagggccaactaaagcctgaaaaccagctccacctcctgcaaagacaggaagaccgatagcacctagaagaagatagagtccagcagaaagtacagcctctctcggtctaaagacagtagcaatcaagccgattgcaaagttttgcagagtgaagggaacaggtccaattggaagactgatttgtgccaaagcagcaatgagagcagccccaatagcagggatagcataaacgtgagcttttttcaaaatagttaacctcttttctaatgtatagtaactattatactcatataggagtcgatgtcaaccattttttaaaaacaaggtaacaaaaactgtaacagccgattttcgtgactagtcaagttggataatttttttgttgattcgaaaatcattaaaaaagaagcagacatatttatatcagcttcttttgtttcgattaacgcatggttacaaattcttcagatgcagttgggtgaattgccacagttgcatcaaagtcagccttggttgctcccattttgatagcaacggcaaatccctgaatcatttcatcaacgccgtagccaattccatgaagtccgacaactttttcttctgaaccagctgttatgagtttgaaacgggattcttgacggttgcaagtgcaagcagagtacatagatgcaaagcttgatttataaaccttgatttggtcttgaccgtattctttaatagcttgctcttctgtcaaaccaacagttccgatagcagggtgtgaaaagacaacagttggaatagttgagtaatccatttttgcagtagtttttccgttaaagagacgttcagatagggtacgtccggccttgattgcaactggagtcagttctttctcgcccgttacatcacctagagcatagattccctcaacaacagtattttggtattcatccacttggataaagccacgttcgttcagagtcactccagctttttcaagttgcaagcccttaacgtttggacggcgacctgtagcccagataacttggctagctgtgtgactagtaccatcttcgaaatgaatggtaatgccgtcagtagttttttctaacttgacagggactttgtgagtgtgaagtggtaagtttgttctttccatttccttgaccaaaccttcaacgatgtaggaatcaaaaccacgtaaaggacgatcgcggcgaacaaagagatctgtcttgacaccaaaagtgtggagtacgccagctaattcaacggcgatataaccagcgcctagaatggcaattgactctggaagttcttcccaggcaaatacatcatcagaagagccacctagctcagcaccaggaatattaggaatacttggatgggcacctgtagcaatcacgatatgtttagcacgaatcagttcaccatttacgcttacagtatgagaatctacaaattcagcatgaccttcaatcaagtctacaccgttgcgtttaaaactaccatcataagaagaacgagcgcgatcaatgtaggcttcacgattgcgacgtagggttgcaaagtcaaagttaagatcagtagtcttaaagccgtagtcttctccaaattgatggaaagtctcagcgatttgcgccccgtaccacatgatttttttaggaacacaaccgacgttgacacaggttccacctaatttcttttcctcaataacggctgctttggctccatgttcaccagcacggttcatggtagcgattcctccgctacctccaccgatagcaatgatatcatattctctcattgaaaactcctttgtaatcttttaaatagtagagcgtcttttttgatagttatattttattctttttttgatttgattgcaaaaatctgctacgcacaaaaaattgcaaaaaagcttgccaaataagtcaagatagtgtattatatatctagtacaatagaaaagcaaaattccgaacgattgtttaatcctgaactgtattgtttgctggagggaaatttggtataatagcaaagtattgtaaaaaagaaaaggagtttcattatgaagaaaaagaatggtaaagctaaaaagtggcaactgtatgcagcaatcggtgctgcgagtgtagttgtattgggtgctggggggattttactctttagacaaccttctcagactgctctaaaagatgagcctactcatcttgttgttgccaaggaaggaagcgtggcctcctctgttttattgtcagggacagtaacagcaaaaaatgaacaatatgtttattttgatgctagtaagggtgatttagatgaaatccttgtttctgtgggcgataaggtcagcgaagggcaggctttagtcaagtacagtagttcagaagcgcaggcggcctatgattcagctagtcgagcagtagctagggcagatcgtcatatcaatgaactcaatcaagcacgaaatgaagccgcttcagctccggctccacagttaccagcgccagtaggaggagaagatgcaacggtgcaaagcccaactccagtggctggaaattctgttgcttctattgacgctcaattgggtgatgcccgtgatgcgcgtgcagatgctgcggcgcaattaagcaaggctcaaagtcaattggatgcaacaactgttctcagtaccctagagggaactgtggtcgaagtcaatagcaatgtttctaaatctccaacaggggcgagtcaagttatggttcatattgtcagcaatgaaaatttacaagtcaagggagaattgtctgagtacaatctagccaacctttctgtaggtcaagaagtaagctttacttctaaagtgtatcctgataaaaaatggactgggaaattaagctatatttctgactatcctaaaaacaatggtgaagcagctagtccagcagccgggaataatacaggttctaaatacccttatactattgatgtgacaggcgaggttggtgatttgaaacaaggtttttctgtcaacattgaggttaaaagcaaaactaaggctattcttgttcctgttagcagtctagtaatggatgatagtaaaaattatgtctggattgtggatgaacaacaaaaggctaaaaaagttgaggtttcattgggaaatgctgacgcagaaaatcaagaaatcacttctggtttaacgaacggtgctaaggtcatcagtaatccaacatcttccttggaagaaggaaaagaggtgaaggctgatgaagcaactaattagtctaaaaaatatcttcagaagttaccgtaatggtgaccaagaactgcaggttctcaaaaatatcaatctagaagtgaatgagggtgaatttgtagccatcatgggaccatctgggtctggtaagtccactctgatgaatacgattggcatgttggatacaccaaccagtggagaatattatcttgaaggtcaagaagtggctgggcttggtgaaaaacaactagctaaggtccgtaaccaacaaatcggttttgtctttcagcagttctttcttctatcgaagctcaatgctctgcaaaatgtagaattgcccttgatttacgcaggagtttcgtcttcaaaacgtcgcaagttggctgaggaatatttagacaaggttgaattgacagaacgtagtcaccatttaccttcagaattatctggtggtcaaaagcaacgtgtagccattgcgcgtgccttggtaaacaatccttctattatcctagcggatgaaccgacaggagccttggataccaaaacaggtaaccaaattatgcaattattggttgatttgaataaagaaggaaaaaccattatcatggtaacgcatgagcctgagattgctgcctatgccaaacgtcagattgtcattcgggatggggtcatttcgtctgacagtgctcagttaggaaaggaggaaaactaagatgcagaatctgaaatttgccttttcatctatcatggctcacaagatgcgttctttgcttactatgattgggattattatcggtgtttcatcagttgttgtgattatggctttgggtgattccctatctcgtcaagtcaataaagatatgactaaatctcagaaaaatattagcgtctttttctctcctaaaaaaagtaaagacgggtcttttactcagaaacaatcagcttttacggtttctggaaaggaagaggaagttcctgttgaaccgccaaaaccgcaagaatcctgggtccaagaggcagctaaactgaagggagtggatagttactatgtaaccaattcaacgaatgccatcttgacctatcaagataaaaaggttgagaatgctaatttgacaggtggaaacagaacttacatggacgctgttaagaatgaaattattgcaggtcgtagtctgagagagcaagatttcaaagagtttgcaagtgtcattttgctagatgaggaattgtccattagtttatttgaatctcctcaagaggctattaacaaggttgtagaagtcaatggatttagttaccgggtcattggggtttatactagtccggaggctaaaagatcaaaaatatatgggtttggtggcttgcctattactaccaatatctcccttgctgcgaattttaatgtagatgaaatagctaatattgtctttcgagtgaatgataccagtttaaccccaactctgggtccagaactggcacgaaaaatgacagagcttgcaggcttacaacagggagaataccaggtggcagatgagtccgttgtatttgcagaaattcaacaatcgtttagttttatgacgacgattattagttccatcgcagggatttctctctttgttggaggaactggtgtcatgaacatcatgctggtttcggtgacagagcgcactcgtgagattggtcttcgtaaggctttgggtgcaacacgtgccaatattttaattcagtttttgattgaatccatgattttgaccttgttaggtggcttaattggcttgacaattgcaagtggtttaactgccttagcaggtttgttactgcaaggtttaatagaaggtatagaagttggagtatcaatcccagtcgccctatttagtcttgcagtttcggctagtgttggtatgatttttggagtcttgccagccaacaaggcatcgaaacttgatccaattgaagcccttcgttatgaatgagatcaacaagatggacactcgtctatcttgtttttgtatggatttccctattgaaattcattaaaaatgtgatataatgaagtgttagaaaaacaggtttcatttgcctggaaaggaaaaattatgtctgaaaaaaatttttatattacaacgccgatttactatccatctgggaaacttcatatcggttctgcctacacaactatcgcatgtgatgtcctagcacgttacaaacgcctgatgggctacgatgtattttatctgacaggtcttgatgaacatggtcagaaaatccagcagaaagcggaagaagctggtattacacctcaagcctatgttgatggaatggcggttggagttaaagaactctggcaattactagatatctcatacgataaatttatccgtacaactgatgactaccatgaaaaagttgtcgcacaagtctttgaacgcttacttgctcaagatgatatctacttgggtgaatactctggttggtattcagtatcagacgaagaattctttacagaaagccagctggcagaagttttccgtgatgaagctggaaatgtgactggtggtattgctccatcaggtcatgaggttgaatgggtttctgaagaatcatacttccttcgccttagcaaataccaagaccgtttggtcgaatttttcaaagctcatcctgaatttatcacgccagatggtcgccttaatgaaatgctacgcaacttcatcgagccaggcttggaagatttggcggtatctcgtacaacctttacatggggagtgcctgtcccatcaaatccaaaacacgttgtctacgtttggattgatgcccttcttaactatgcgacagctcttggctacgctcaagacgaacatggtaactttgacaagttctggaatggaacagtcttccatatggtaggaaaagatatccttcgcttccactctatctactggccaatccttcttatgatgttggatgttaaattacctgatcgtttgattgcccatggttggtttgtcatgaaagacggaaaaatgtctaagtcaaaagggaatgtcgtttaccctgaaatgttggtagagcgttatggactagatccacttcgttactacctcatgcgtaaccttccagttggttcagacggaacctttactcctgaagactatgtcggccgtatcaactatgaattggctaatgaccttgggaacctccttaaccgtacggtttccatgattaataagtactttgatggacaaatccctgcctatgtagaaggtgtgactgaatttgatcatgttcttgctgaggttgcagaacaatcaatcgcagacttccatacacacatggaagcagttgactatccacgtgcgcttgaagcagtctggactctgatctctcgtaccaataaatacatcgatgagaccgcaccatgggtcttggccaaggatgaagctcttcgtgaccaattggcaagtgtcatgagccacttggcagccagcattcgtgtagttgctcacttgattgaaccatttatgatggaaactagtcgtgcagttttgactcaacttggtttggaagaagtttctagtcttgaaaacttgagtttggctgacttcccagcagatgtgactgtagttgccaaaggaacacctatctttccacgtctaaatatggaagaagaaatcgcctatatcaaggaacaaatggaaggcaataaaccagcagtcgaaaaagaatggaatccggacgaagttgagctcaaactaaacaaggatgaaatcaagtttgaagactttgacaaggttgaaatccgtgtcgcagaagtcaaagaagtgtctaaagtagaaggttcagataagttgcttcaattccgcttggatgctggtgatggagaagatcgtcagattctttcaggaattgcaaaatactatccaaatgaacaagaattggtcggcaagaaagttcaaatcgttgctaacctcaaaccacgtaaaatgatgaaaaaatatgtcagccagggtatgattctctcagctgaacatgatggcaaattaacccttctcacagttgatccagctgtaccaaatggaagtgtgattgggtaaaagtagacaggactagttcaggctagttctgtttttttatttatactcaatgaaaatcaaagagcaaactaggaagctagccgcaggttgctcaaaacactgttttgaggttgtagacgaaactgacgaagtcagctcaaaacatgtttttgaggttgtagatgaaactgacgaagtcagctcaaaacactgttttgaggttgtagatgaaactgacgaagtcagctcaaaacactgttttgaggttgtagatgaaactgacgaagtcagctcaaaacatgtttttgaggttgtagatgaaactgacgaagtcagtaaccatacatacggtagggcgacgctgacgtggtttgaagagattttcgaagagtattaactattatgctttacaaactagtgtagaagtgatatactataggtgaagtcactagtaggtattacaaaatagattagaagggagaagtgatgaaagaaactcagctattaaaaggtgttcttgaaggttgtgtcttggatatgattggtcaaaaagagcggtatggttatgagttggttcagactttgcgagaggctggatttgatactatcgttccaggaactatttatcctttgttgcaaaagttagaaaaaaatcaatggataagaggcgacatgcgcccgtcgccagatggtccagatcggaagtatttttcattaatgaaagaaggagaagagcgtgtctcagtcttttggcaacaatgggacgatttgagtcaaaaagtagaagggattaagaatgggggttaaaccatgaagaaaatgaagtattacgaagaaacaagcgctttgctacatgagttttctgaggagaatcaaaagtattttgaggagttgtgggaaagttttaatcttgctggatttctctatgatgaagactatctcagagagcagatctatttgatgatgctagatttctcagaagcagaacgagatggcatgagtgcagaggattatctaggtaagaatcctaaaaaaataatgaaagagattctcaagggagcacctcgcagttctatcaaagagtcccttttgacgccaattcttgtcctggcggtattacgttattatcaactactaagtgatttttctaaaggtcctctcttaacagtcaatttgctcacatttttagggcaacttcttatttttctgattggatttggacttgtggccacaattttacgaagaagtttagtccaagattctcctaaaatgaaaattggcacttacattgttgttgggactatagttcttctagttgttttaggatatgtaggaatggcaagcttcatacaagaaggagccttttatattccggctccctgggatagtttgtctgtctttacgatttcgctagttatcggtatttggaattggaaagaagcggtctttcgtccatttgtcagtatgattattgcccatcttgtggtgggttctctgctccgttattatgagtggatgggaatttcaaatgttttccttacaaaagttattcctttagctgtcctctttattggaatctttgtcttgttccgtgggtttaagaagataaaatggagtgaagtatagtcaaaaagtcgttgcaaagcggttttttgttataatgaagggaagaatgttagaaattaaaggagaaaaatttgatgagatacataactcttggtcaagatgacaaagaattatcagaaattgttctcggaatgatgagaataaaagataaatctgtaaaagaagttgaagagcttgtagaaacagcactttctgttggaatcaatgccttcgacttggctgatatttatggtcgtggtcgttgtgaagaactgttaggtcttgtcctaaaaaatcgtccagatttaagagaaaagatgtggattcagtccaaatgtggcattcgcattgaagaatttacctattttgatttttctaaggactatattataaaatcagtagacggtattttgcaaagattgaagattgatcatctagatagcttgctccttcatcgaccagatgctttgatggaatctgaccaagtagcagaagcctttaatctcctttataaacaaggtaaagttcgagattttggagtttctaatcaaaatcctatgatgatggagttgcttaaaaaagatgtcaagcagccgttagctgttaatcagctacaattgagtgcggcttttactccaggatttgaatcagcttttcatgttaatatggaagatagtcaagcagctatgcgagatggcagcatttttgaatattgccaattacacgatgtggtcattcaagcatggtctgtcttacaattcgggtattttaaagggaattttgttggaaatgagaaatttcaagctttaaatcaagtacttgatcgtttagctattaaatatggagtaacctcttcaactattgccatttcttggatattgcgttatccagcaaaaatgcaggcagtcgtaggtacaacaaatcctaagcacttgagagaagttagccgagcggcaaactttagcttaacaagaaaagaatggtatgaaatttatcttgctgcagggaataatttgccgtaagtagtagcaggtttgaataactcacattcaaaaagccgtataaagcggttttttgctataattaaatgaagaatgtagaattaaaggagaaaaacatgacatttgaagagatcctgcctgggttaaaggctaagagaaaatatgtacgaactggttggggaggtgcggaaaactatgtccaactctttgataccatcgagcaaaatgggcttgcacttgaaatgacaccttatttcctaatcaacgtttctggcgaaggagaaggtttttccatgtggagcccgacagtttgtgatgttttggcaacggattgggtagaagtgcatgactaaacgtgtactcattacaggagtgagttcagggatcggattggctcaagctcgcctctttttagagaagggctatcaagtttatggagttgaccaaggtgaaaagccactcttagagggtgattttcgctttttacagagagatttgaccttggacttggaacctatttttgactggtgccctcaggtggatgttttgtgtaatactgctggagttttggatgattacaaaccactgttggaacaaacggcgcaggacattcaagagatttttgaaatcaactacattattccagtagagttgactcggtattatttgacacaaatgctggaaaataaaaagggaatcatcatcaatatgtgttccattgcttctagcctagcaggtggaggtggtcacgcctatacttcatccaagcatgccttggctggcttcaccaagcagttggctctagactatgctgaagctgggattcaggtctttggtatcgctccaggagcagtcaagacagctatgaccgctgcggattttgaaccaggtggtttggctgactgggtggctagtgaaaccccaatcaagcgctggattgagccagaggaaatagcagagcttagtctttttttagcaagtggaaaagcgagcgccatgcaaggacaaatcttgacaatagatggtggctggtctttgaagtaggaggagttggatggaaatcaaaaatcactttggggtctactgtgtttgctttgaaaatggaaagttactttgcattgaaaaaacgagaggcccttatcaacatcggtatgatctacctggaggcagtcagcaacttggtgaaggactgacggaaacgctgactagagaagttatggaagagacgggatttactgttagaagctactctaatcctcgaatctacgatgttttcgtcagggaagagttaaaaaattttatggttcaccatgtcatagccttgtatgatgttgaaatgaatgagagtgcacctcaagttacgatttcggaagctgtgtctgatggtgcgaatgattcacttggatatatttggatggatattcaagagattacagaagaaaatgcatcgccattagtcttgaaggttaagtctgaattattaggatttccagaactggacaagacttcttacatgaattggaaggtgaatgatgagaaatcaacttgcccttagtggcgaaaaaattcttgaaaaaatttatcctcaactatttcaccacgtcggcatgattcgtggggaatacttattgagagagctcaatcaaaatatactattacaaagttgtcaggaatttgtgaaagattatcttgatactatttgctccttttacttaggtaaggaagtttggtatcgttttactgaattaacgaatacagaagccaattgtttagtggggactaaagagttttttgacgaagggcatcccttgtttggctatagaggaactaggcgtttactggcgtgtttggatgaatttcaggctgaagcacatgtcgttacagaagtttatcaaaccaaccccaatctatctgttatctttccttttgtcaatgatgccgaccaattaaaacaagctattacagtattgcgtcagcagggttttactgggaaagtcggaacgatgattgaattaccgtcagcgtattttgacttatctagtatactggaaacgggcatttcaaagattgtagttggaatgaatgatttgacttcctttgtttttgcgactatgagaaacagtcaatggcatgatatggaaagtccaataatgttagatatgctaagagatatgcaggataaagcaagaaagaacaagattgattttgctgtagcaggctatctgaatacttctttcatacaaaaaatgaatcagttgggtatcaagtgcattatccactacagttctattccagagatttttgatttagagattgaccatccagatcatcttaaacacataaaagaagaaagtaaaaaattacaaaggagcacccatgataccgcaagaaatgtggaataaatacaagcaaatcaatcctttgatcggagatgaaatcgatgcctgggcttttggagttgaaccagaccttttagcggatttggtgtttaaaggagaaaagacagcaacagcatcagcctatgacctctatgtgctagaagacgaaccacttccccaagtagggaccttcgatgtcattttagatagtcaaaatcaggctgtctgcattgtcgaaattacaaaggtttctgttaaacccttcaatcgagtgtcagctgaccatgcctataaggaaggtgagggaaacaagacacttgtctattggcgccaggttcatgaggattttttcagagactgcttgggtgaagcaggattgacttttacacctgaaagcaaggttgttttagaagaatttcgcaaggtctacccactgtagactattagaaggaagaaagttttggaaatcgctgtccaatccttttttctgaagcaaaatatgatataataagtttgtttgaagaagagcagcagctcttaaacttagaataggagaaaactatgcaagcagttgaacattttattaagcaatttgttcctgaacattatgatttatttttagatttgagtcgtgagaccaagactttttctgggaaagtgaccatcactggtcaagcacagagtgaccgcatctccctccaccaaaaagatttggaaatcacctctgtagaagttgcaggtcaagctcgtccatttacagttgaccatgacaatgaagcccttcatatcgaattggctgaggctggtcaagttgaattggttcttgccttttctggtaaaattacagacaacatgacagggatttacccttcttattatacagttgatggagtcaagaaggaggtcttgtctactcagttcgagagccattttgcgcgcgaagctttcccatgtgtggatgagcctgaagccaaagcaacttttgacctctctcttcgctttgaccaagcagaaggtgaattggccttgtcaaacatgccagaaatcgatgttgaaaaccgtaaggaaacaggtatctggaagtttgagacaacacctcgcatgtcttcttacttgttggcctttgttgctggtgatttgcaaggggtgaccgctaaaactaaaaatggtaccctggtaggtgtctactcaaccaaagcacatccactttcaaatcttgatttctcactggatatcgctgttcgctctatcgagttttacgaagattactatggagttaagtacccaattcctcaatctctccacatcgcccttcctgacttctcagctggtgctatggaaaactggggtcttgtgacctaccgtgaagtttacttggttgtcgatgagaactctacatttgctagccgtcaacaagttgcccttgttgtggcccatgaattggctcaccaatggtttgggaacctcgtgactatgaaatggtgggatgacctttggctcaatgaaagtttcgctaatatgatggaatacgtctgtgtggataccatcgaaccaagctggaatatctttgaagatttccaaacaggtggagtacctcttgctcttgaacgtgacgctactgatggcgttcagtctgtccacgtcgaagttaaacatccagatgaaatcaatacactctttgacggcgctatcgtctatgccaaaggaagccgtctcatgcacatgcttcgccgttggctaggagatgctgattttgctaaaggtttgcacgcctactttgaaaaacaccaatacagcaacaccattggtagtgacctttgggatgcccttggtcaagcgtcaggacgtgatgtcgcagccttcatggattcttggttggaacagcctggttacccagttcttactgttaaagttgaaaatgatgtcttgaagatttcacaaaaacaattcttcatcggtgagaacgaagacaagaaccgtctctgggtggtgcccctcaatagcaactggaaaggcttgcctgatacactcgaaactgaaagtatcgaaatccctggctacgcagctcttcttgctgaaaatgaaggagctcttcgtctcaacactgaaaatactgcccactatattaccgactatcaaggagacttgttagcagctgttcttgctgagctagagacacttgataacacaagcaaactgcaaattgttcaagaacgtcgtttgttggctgaggcagggcacatttcttatgcagacttgcttccagttcttgataaacttgctaaggaagagtcttatctggtggtttcagctgtttctcaagtgatttcagcccttgagcgctttattgatgaaggaacggatgctgaaacagccttcaaaggactggttgctaaattggctcgtcataactatgaccgtcttggttttgaagctaaagacggagaatcagatgaggatgaattggttcgtcagctggctgtttcgatgatgattcgctcaaatgatgcagaagctagtcaagtcgctagccaaatcttcgcaacacacaaggagaatcttgcaggactcccagcagctattcgctcacaagttctgattaatgagatgaaacatcatgagactaaagacttgttagcactttatcttgatacttatactcacgcaacagatgctgtctttaaacgccagttggcagcagctcttgcatacagtacagatgcggataatatccaaaacctgattacttcttggaaggacaaatttgtggtcaaaccacaggacttgtctgcttggtattaccaattcctagctcatcaagcaactcagaaaacagcttggtcttgggcgcgtgaaaactgggcttggattaaggcagcccttggaggagatatgagctttgatagctttgttatccttcctgctcatgtatttaagactcagcaacgcttggcggaatacaaggagttctttgaaccgcaactttctgaccttgctcttagccgtaacatcggtatgggaatcaaggaaattgcagcgcgtgttgacttgattagccgtgaaaaagctgcagtcgaagcagttgttcttcaatacggaaatgcataaataagcctaaaataaaaagaaaactcagctatctcatgtaaaatgcagagagttgagttttttttaaggcaaatttggtataatagttttaataaggaggagtttctcatgataaaaatcttattggttgaggatgacctaggtctgtcaaattcagtatttgactttttagacgattttgcggatgttatgcaggtatttgatggagaagaaggtctctacgaagctgagagtggtgtctatgacttgattttgctggatttgatgttgccagaaaaaaatggtttccaagtcttaaaagaattgcgtgaaaagggaattacgacaccagttctgattatgactgccaaggaaagtttggatgacaagggacatggatttgaactgggagcggatgattatctgaccaaacctttctacctagaagaacttaaaatgcggattcaggcccttctcaaacgttcagggaagtttaatgaaaacaccttgacttatgggaatatcgtggttaatttatcaaccaataccgttaaagttgaagatactcctgtcgaattgctggggaaagagttcgatttactagtttatttccttcaaaatcaaaatgtgattttgcctaagacgcagatttttgaccgtctatggggatttgatagtgatacaacgatttcggttgtcgaagtctatgtttcaaaagtccgtaagaaattaaagggaaccacttttgcagagaatttgcaaactttgcgtagtgttgggtatcttttaaaagatgttcagtaaacttaaaaaaacatggtatgcggatgactttagttattttatccgcaacttcggtgtcttcaccctgattttttctacaatgactctgattattttacaagtcatgcattcgagtctttatacttcggtggacgataagcttcatggactgagtgaaaatcctcaagcagttattcagctggctataaatagggcaacagaagagattaaagatttagaaaatgctagggcggacgctagtaaagtagaaataaaacctaatgtcagttccaatacggaagtcattctctttgataaagactttactcaacttctttctggaaatcgatttttgggcttggataagattaagttagaaaagaaagaactaggacatatctaccagattcaggtttttaatagctatgggcaggaagaaatctatcgtgtgattttgatggagaccaatattagttcggtttcaaccaatatcaagtatgctgctgtcttgattaataccagtcagttggaacaggctagtcaaaagcatgagcaattgattgtggtcgtgatggctagtttctggattttgtctttacttgccagtctctatctagctagggtcagtgttaggcccctgcttgagagtatgcagaagcaacagtcttttgtggaaaatgccagtcatgagttacgaactccactcgcagttttgcaaaatcgcttagagaccctttttcgtaagccagaagctaccattatggatgtgagcgaaagcattgcatcgagtttggaagaagtccgaaatatgcgttttttaacgacaagcttgctgaacttagctcggagagatgatgggattaagccggagcttgcagaagttccaactagcttttttaatacaactttcacaaactacgagatgattgcttcggaaaataatcgtgtcttccgttttgaaaatcgtatccatcgaacaattgtcacagatcagcttcttctgaaacaactgatgaccattcttttcgataatgccgtcaagtatactgaggaggatggtgaaattgattttcttatctcggcgaccgatcgcaatctttatttacttgtttctgataatggaatcggtatttcgacagaagataaaaagaaaatttttgaccgtttttatcgagtagacaaggctagaacccggcaaaaaggtggttttggtttaggattatccctagccaagcaaattgtagatgctctaaaaggaactgttactgtcaaagataataaacccaagggaacaatctttgaagtgaagattgccattcagacaccatctaaaaagaaaaaataaaaatatcgctccaattggggcgatattttggatttatcttctacgttttcgtttgataatagaccgttgaacttttaaaacaagtaagctgaatccgattgctgcggcaaaggcaagagcagttgataattttaatgctaaaaagataaaactaaagatagcaatacagatacaaaaaacagcgatattaataaaaaataggatttccttgagattggcatcagattgcgcttcaggtgtataagcttggtaatgaggaagctgctggtttaattcttcttgatagtctacctcataggattgtaattttcttacgggcatgattctctccttaacagtacatacctattttatcattttttcggcagagaattattacagaaaggttacaaaaagaataaagtcccttttcattttcaaagcatggctgattttggagaaatgtggtataatttttcttatggaaaagattgtcattacagcaactgctgaaagtattgaacaagttgaacaactactcgaagctggcgtagaccgtatctatgtcggtgagaaagattttggtcttcgtctgccaacgacctttagttatgaccaattacgtgaaatcgctaagttggttcatgatgctggtaaggaattgatcgttgcggtcaatgctctcatgcaccaagatatgatggaccgtatcaagcctttcttaaacttcttggaagaaatcaagacagactatattacgattggggatgcaggcgtcttttacgtagttaaccgcgatggttattcatttaagaccatctacgatgcttcaaccatggtaactagcagtcgtcagattaacttctggggacaaaaggctggcgcatctgaggctgttttggcgcgtgaaattccatcagctgaacttttcaaaatgccagagattttggaaattcctgctgaagttttggtttacggtgctagcgtcatccatcattctaaacgtccactcttgcaaaactactataactttacacatatcgatgatgaaaagacgcataaacgtgacctcttcttggctgagccaagtgatccagagagccactattccatttttgaagataatcatgggacccatatctttgccaacaatgaccttgatttgatgatcaaattaacagaattggtggagcatggctttactcgctggaaactagaagggctctacactcctggtcagaactttgttgagattgcaaaactctttatccaagcgcgtagcttgattcaagagggcaactttagtcatgctcaagccttcttgctggatgaagaagttcgtaaacttcaccctaaaaaccgtttccttgatacaggattttatgactacgatcctgacatggttagataaaatacatgattcgttgagagaaggaagatgcaaacatttcttctctcaatttttcgtatttcttcactattttacaaaaatcagcaggctagaatgctctattcgatgggatttttaagaaaagtagtgttcttgagtttgaaaattatcctatgtttgcaggtgccaaatggccctttttttggtataattttttataatgaaaacgattggtaatcgctatgttgtggtggatttagaggcaactagcacaggtagtaaggctaaaattatccaagtgggaattgtcgtgattgaggacggagaaatcgtcgatcactatacgacggatgtcaatccacatgaacccttggatgctcatatcaaagaactgacaggattgacagaccaacgtctggcgcaagcacctgatttttcgcaagttgccagaaaaatatttgacttggtggaggatgggatttttgtagcccataatgttcagtttgatgctaatctcttggcggaaaatttattttttgaaggctatgagctaagaaaccctcgtgttgatacggtcgaattggcccaggtctttttccctgaactggaaaaatatagcttgccgattttgtgtcgagaattaggaattcctcttaaacacgcacacacagccctttcagatgcccaagctacagcagaattacttctttttttacggaaaaagatgacccagcttcctaaaggtctcttggaacgcttgctggaaatggctgacgctctcctatatgagtcctacctggttattgaggaaacttatcgcaaccaatctatcctgagttctccagacttggtccaagttcaaggtctatattttaagaaaacggaagcttctctggagccacgaaaactatctcaagacttttctaaaaatatttctctgttgaaccttgaagtgagggaggaacaagaaagttttgctaaagaggttggcttgctattgaaagatgaacctgtctctctgattcaagcgccgacagggattgggaaaacctatggctatctcttacccgctttatctcaatccaaagagcgacaaattgttcttagtgttccgacaaagattcttcaaaatcaaatcatggaagaagaaggtaaacgcctcaaggaagtgttccatacagatattcatagcttaaagggaccacaaaattatctgaagttggatgccttttatcattccttgcaggaaaatgatgaaaatcgcttatttagacgctttaaaatgcaagtcttggtctggcttactgagacagagacaggagatttggatgaaatcgggcaactctaccgttaccaacattttctagcagaccttcgtcatgatgggaatttatcatcccagagcttatttgtgacggaagatttttggaaacgtagtcaagaaagggcagagacttgcaagcttttagtgactaatcatgcctatctcgtaaccagacttgaagataatcctgaatttgtcagtgaccgtttactgattattgatgaagtccaaaagattttgttagctctagaaaatctgcttcaagagacctacgatatacaatctattatcgatttaattgataaggctttagtaggagaagaaaacagggttcaacaacggatactagaaagtattcgctttgagtgtctctacttgatagaacaatttcagtctggcaaatctaggaaaaatatcttagattctctggacaatctccatcagtatttttcagaattggaagtagaagactttgatgagctggttcgctattttacagctgaaggtgattactggcttgaagtaactgaaacgagtcaaaagaaaattcagatttcttctacaaaatcaggccgtactcttctgtcctctttacttcctgagagttgccaagtcttgggagtatcggctactcttgagattagtcagagggtttctttggcagaccttttaggctatcctgaagctaaatttgtcaagattgaatctcggggaaaacaggaacaagaagtggtcatggtcaaagatttccctctggtaacagaaacctccttagaagtctatgccagagaggtagctgctttactagtggaaattcaagctttccagcaaccgattttggttctctttaccgctaaagacatgcttctagcagtatcggatttacttacagttagccacttggcccagtataaaaatggggatgttcatcagctaaagaaacgctttgaaaaaggtgaacaacaaatcttgcttggtgcagcaagtttctgggagggagttgatttttcaagccatccttctgtgattcaagttgtaccgaggcttcctttccaaaatcctcaagaacccttgacgaaaaagattaatcaagaactgaatcaagaagggaaaaatgccttttatgattatcaattgccaatggccattattcgtttaaaacaggctttgggaagaagtatgagacgtgaataccaacgttccttaactcttattttggataggagaatcgtcggaaaacgatacggcaaacaaatagtagcatctctagcagaagaagcgactgttaaaaccatctctcgatccgaagttgacgaggctattgatagattttttaatgagctttgataaatagtattgtatgaaagtataaggttagtatatatgaaacgttctctcgactcaagagtcgattacagtttgctcttgccagtattttttctactggtcatcggtgtggtggctatctatatagccgttagtcatgattatcccaataatattctgcccattttagggcagcaggtcgcctggattgccttggggcttgtgattggttttgtggtcatgctctttaatacagaatttctttggaaggtgaccccctttctatatattttaggcttgggacttatgatcttgccgattgtattttataatccaagcttagttgcatcaacgggtgccaaaaactgggtatcaataaatggaattaccctattccaaccgtcagaatttatgaagatatcctatatcctcatgttggctcgtgtcattgtccaatttacaaagaaacataaggaatggagacgcacggttccgctggactttttgttaattttctggatgattctctttaccattccagtcctagttcttttagcacttcaaagtgacttggggacggctttggtttttgtagccattttctcaggaatcgttttattatcaggggtttcttggaaaattattatcccagtatttgtgactgctgtaacaggagttgctggtttcttagctatctttattagcaaggacggacgagcttttcttcaccagattggaatgccgacctaccaaattaatcggattttggcttggctcaatccctttgagtttgcccaaacaacgacttaccagcaggctcaagggcagattgccattgggagtggtggcttatttggtcagggatttaatgcttcgaatctgcttatcccagttcgagagtcagatatgatttttacggttattgcagaagattttggctttattggctctgtcctggttattgccctctatctcatgttgatttaccgtatgttgaagattactcttaaatcaaataaccagttctacacttatatttccacaggtttgattatgatgttgctcttccacatctttgagaatatcggtgctgtgactggactacttcctttgacggggattcccttgcctttcatttcgcaagggggatcagctattatcagtaatctgattggtgttggtttgcttttatcgatgagttaccagactaatctagctgaagaaaagagcggaaaagtcccattcaaacggaaaaaggttgtattaaaacaaattaaataaggagaaaatcatggtaaaagtagcagttatattagctcagggctttgaagaaattgaagccttgacagttgtagatgtcttgcgtcgagccaatatcacatgtgatatggttggttttgaagagcaagtaacgggttcgcatgcaatccaagtaagagcagatcatgtctttgatggagatttatcagactatgatatgattgttcttcctggaggtatgcctggttctgcacatttacgtgataatcagaccttgattcaagaattgcaaagcttcgagcaagaagggaagaaactagcagccatttgtgcggcaccaattgccctcaatcaagcagagatattgaaaaataagcgatacacttgttatgacggcgttcaagagcaaatccttgatggtcactacgtcaaggaaacagtagtggtagatggtcagttgacaaccagtcggggtccttcaacagcccttgcctttgcctacgagttggtggagcaactaggaggggacgcagagagtttacgaacaggaatgctctatcgagatgtctttggtaaaaatcagtaaaacgggagttattctctcgttttttatgtggaaaactcagggaaatcatcgcttttttcataaaaaaatgctataatgaagggtatgaaatatcacgattacatctgggatttaggtggaactttactggataattatgaaacttcaacagctgcatttgttgaaacattggcactgtatggtatcacacaagaccatgacagtgtctatcaagctttaaaggtttctactccttttgcgattgagacattcgctcccaatttagagaattttttagaaaagtacaaggaaaatgaagccagagagcttgaacacccgattttatttgaaggagtttctgacctattggaagacatttcaaatcaaggtggccgtcattttttggtctctcatcgaaatgatcaggttttggaaattttagaaaaaacctctatagcagcttattttacagaagtggtgacttctagctcaggctttaagagaaagccaaatcccgaatccatgctttatttaagagaaaagtatcagattagctctggtcttgtcattggtgatcggccgattgatatcgaagcaggtcaagctgcaggacttgatacccacttgtttaccagtatcgtgaatttaagacaagtattagacatataagaaaaaggaataagatgacagaagaaatcaaaaatctgcaggcacaggattatgatgccagtcaaattcaagttttagagggcttagaggctgttcgtatgcgtccagggatgtacattggatcaacctcaaaagaaggtcttcaccatctagtctgggaaattgttgataactcaattgacgaggccttggcaggatttgccagccatattcaagtttttattgagccagatgattcgattactgttgtggatgatgggcgtggtatcccagtcgatattcaggaaaaaacaggccgtcctgctgttgagaccgtctttacagtccttcacgctggaggaaagttcggcggtggtggatacaaggtttcaggtggtcttcacggggtggggtcgtcagtagttaatgccctttccactcaattagacgttcatgttcacaaaaatggtaagattcattaccaagaataccgtcgtggtcatgttgtcgcagatcttgaaatagttggagatacggataaaacaggaacaactgttcacttcacaccggacccaaaaatcttcactgaaacaacaatctttgattttgataaattaaataaacggattcaagagttggcctttctaaatcgcggtcttcaaatttcaattacagataagcgccaaggtttggaacaaaccaagcattatcattatgaaggtgggattgctagttacgttgaatatatcaacgagaacaaggatgtaatctttgatacaccaatctatacagacggtgagatggatgatatcacagttgaggtagccatgcagtacacaactggttaccatgaaaatgtcatgagtttcgccaataatattcatacccatgaaggtggaacacatgaacaaggtttccgtacagccttgacacgtgttatcaacgattatgctcgtaaaaataagttactgaaagacaatgaagataatttaacaggggaagatgttcgcgaaggcttaactgcagttatctcagttaaacacccaaatccacagtttgaaggacaaaccaagaccaaattgggaaatagcgaagtggtcaagattaccaatcgcctcttcagtgaagctttctccgatttcctcatggaaaatccacagattgccaaacgtatcgtagaaaaaggaattttggctgccaaggctcgtgtggctgccaagcgtgcgcgtgaagtcacacgtaaaaaatctggtttggaaatttccaaccttccagggaaactagcagactgttcttctaataaccctgctgaaacagaactcttcatcgtcgaaggagactcagctggtggatcagccaaatctggtcgtaaccgtgagtttcaggctatccttccaattcgcggtaagattttgaacgttgaaaaagcaagtatggataagattctagccaacgaagaaattcgtagtcttttcacagccatgggaacaggatttggcgcagaatttgatgtttcgaaagcccgttaccaaaaactcgttttgatgaccgatgccgatgtcgatggagcccacattcgtacccttcttttaaccttgatttatcgttatatgaaaccaatcctagaagctggttatgtttatattgcccaaccaccaatctatggtgtcaaggttggaagcgagattaaagaatatatccagccgggtgcagatcaagaaatcaaactccaagaagctttagcccgttatagtgaaggtcgtaccaaaccgactattcagcgttataaggggctaggtgaaatggacgatcatcagctgtgggaaacaaccatggatcccgaacatcgcttgatggctagagtttctgtagatgatgctgcagaagcagataaaatctttgatatgttgatgggggatcgagtagagcctcgtcgtgagtttatcgaagaaaatgctgtctatagtacacttgatgtctaaaaaatagggagaagtagttcccttggtctaaaaaatatgatataatcgttacgattgtttcaagtaaaaaaggagtttgatatgtctaatggacaactaatttatttaatggttgcaattgcagtcattttagttctggcttatgtagtggcaatctttctacgtaagcgaaacgaggggagattagaggcgctagaagaaaaaaaagaagaactatacaatcttccagtaaatgatgaagtagaagctgtaaaaaatatgcacttgattggacaaagtcaagtggctttccgtgaatggaatcaaaaatgggtcgatttatctctcaactcttttgccgatattgaaaataatctctttgaagcagaaggctataaccattcatttcgttttctcaaggccagtcatcaaattgaccaaattgagagtcaaattactttgattgaagaagatattgcggcaattcgcaatgctttggcagacttagagaagcaagaatctaaaaatagtggtcgtgttcttcatgctttggatttatttgaggaacttcagcatagagttgctgaaaattcagaacagtatggtcaagccttggatgaaattgaaaaacaattagaaaatatccaatctgaattttcacaatttgtaaccttgaattcatcgggtgaccctgtggaagccgcagtgattttggataatacagaaaatcacattttggccttaagtcatattgtggatcgtgttccagccttggttacgacgctttctacagaattgccagatcaattacaggatttggaagccggttatcgtaaactaattgatgctaattatcattttgttgaaacggatattgaagcgcgtttccacttgctttatgaagcattcaagaaaaaccaagagaatattcgtcagttggaattggataatgccgaatatgagaatggacaggcacaagaggaaatcaatgccttgtatgatatttttactcgagaaattgctgctcagaaagtagtggaaaatctacttgcaactcttccaacttatcttcaacatatgaaagagaataatactttattgggagaagatattgcacgtttgaacaagacctatttacttcctgagacagctgcaagccatgttcgtcgtattcagacagaattagagagttttgaggcagctattgttgaggtaacttcaaatcaagaagaaccaacccaagcttattcagttcttgaagaaaatcttgaggatttacaaactcaactaaaagatattgaagatgagcaaatttcagttagtgagcgcctgacacaaattgagaaagatgatattaatgcacgtcaaaaggccaatgtttatgtcaatcgtctccatactatcaagcgatacatggaaaaacgcaatctgccaggtattccacaaactttcttgaagttattctttacggcaagcaataataccgaggatttaatggttgagttagaacaaaaaatgattaacattgaatctgttacccgagttcttgaaattgcaacgaatgatatggaagctttagaaacggaaacttataatattgtacaatatgcaactttgacagagcaactcttgcaatattctaaccgctatcgctcatttgatgaacgcattcaagaagcatttaacgaagctttagatatttttgaaaaagaatttgattatcacgcttcatttgacaagatttctcaagcattggaagtggcagagcctggtgtaaccaatcgctttgttacctcatatgagaaaacacgtgaaacgattcgtttttaataaaagaaaaagattttattgtgtgaggagcagaatcaaatctttttctatagttgtggggagatttacttcattttctcctgagattgagtttttgcccagccgatttatccactacctcaaaacagtgttttatactcttcgaaaatcttttcaaatcacgtcagcgtcgccttaccgtactcaagtacagcctgaggctagcttcttagtttgctttttgattttcatttagtattaaagtgatttcgccagtcttatctgcagcttcaaatctgtactttgagtaacttggtaaccgtccaataacgaagtctattgaaaaatctccagactagagaactcacggatagttcctaatctggagatttcttatttgcacttttcttgtacaactttagtccacggtaaatagacctctaaaacctctttgtttacgagagtttcctcgtttggaagacattctagaagataggatagatatttctcgctatttatactagactaaaatcaaaaagcattatataatagtgatatgaaatcaactaaagaagaaatccaaaccatcaaaacacttttaaaagactctcgtacagctaaatatcataaacgccttcaaatcgttctatagtaaaatgaaataagaacagtacaaatcgatcaggacagtcaaattgatttctaacaatgttttagaagtagaggtgtactattctagtttcaatctattatatttcgtctgatgggcaaatcttataaagagattatagaacttttatagtagattgaaataagatgtgaacaactctatcaggaaagtcaaattaatttatagaaatattttagcagccaaggtgtactgttatagattcaatacactatagactgtaatcaaacaacgatttggcgaaatgtaaaaaaatatgaggagttcggactcgactctctccttcaagaaacacgtggtggtcgtaaccatgcatatatgacagttgaggaaaagaaagtctttcttgcccgccatttgaaggctgcagaggcaggagaatttgttacaattgatgccttatttcaggcttataaaaaggagttaggtcgttcctacacacgtgatgccttctatcaactgttgaagtgccatggttggcgaaatattatgccacgtccagaacatcctaagaaagcagacgctcaaaccattgtcgcgtctaaaaataaaatctcaattcaagaagaaaagaaagcgctttaaaaccagtagacgttttcgtaaggttcgcttgatgtaccaagatgaggctggtttcggtagaatcagtaaactgggatcttgttgggctccaataggagtaggtccacatatccatagtcactatatacgagaatttcgctattgttatggagctgttgatgcccatacaggcgaatcatttttcttaatagctggtagatgtaatactgagtggatgaacgcctttttagaagagctttcacaagcttatccagatgattatcttttactcgttatggacaatgctatatggcataaatcaagtaccttaaagattccgactaatattggttttacctttattcctccatacacaccagagatgaaccccattgaacaagtgtggaaagagattcgtaaacgtggatttaagaataaagcctttcaaactttggaagatgtcatgaatcaactccaagatgttatacaaggattggagaaggaggtgataaagtccatcgttaatcggagatggactagaatgctttttgaaaacagatgagtataaaaagaaagtcctcatttcaatagaaatcacgactttctgatggatttatagtaaaatgaaataagaacaggacaaatcgatcaggacagtcaaatcgatttctaacaatgttttagaagcagaggtgtactattctagtttcaatctactatatttttggagtgatagaaaagcccttcataagctagtctacttgttcaggtgcgagagctttgacatctttttctgtacttagccaagtcagttttccgttctcaaagcgtttatatagtagccaaaatccttgaccatcccagtaaagggctttaaagcggtctttacgtccaccacaaaagagaaagacttgaccggagaaagaatccaattcaaagtgggttttaactacataggctaatgagtctattccctgcctcatatctgtcttgccacaaacaaggtgaacttgacctaaatcacttagttgaattatcatagtacaatacctttcctccgataattattttttatctagtatactggaagttggggaattaggatagataccttgttatgacgcgcttacgtaacttgtaactagctgcctagtttgatctttgcttcttcattgattagcagtagatttcaaaatgataaaaacgcatagtatcaggtattgaaatgtactgccccaaaagttagacagaaaaaatctaacttttggggtgtttttgttatgaaattaagttatgatgataaagttcagatctatgaacttagaaaacaaggatatagcttagagaagctttcaaataaatttgggataaataattctaatcttaggtatatgattaaattgattgatcgttacggaatagagttcgtcaaaaaaggaaaaaatcgttactattttcctgatttaaaacaagaaatgattaataaagtcttacatgaaggctgaactaaagatagagtttctcttgaatacggtctcccaagtcgtacgatacttcttaactggctagcacaatacagaaaaaacgggtatactattgttgagaaaacaagagggagagtacctaaaatgggacgtaagccaaaaaagagacctgaagagagaacagaattagaacgtcttcaagcagaaaatgagtacctgagagcggagaatgctatcctaaaaaagttaagagaactccgatggaaggaggaaaaagagaaagaagaaagacagaaattgttcaagaattaatgactgagttttcgttagatcttcttctaaaagccattaaactagctcgttggacctactactatcacttgaaacagctagacaaaccagataaggaccaagagcttaaagctgaaattcaatccatttttatcgaacacaagggaaattatggttatcgtcggatttatttagaactaagaaatcgtggttatctggtaaatcataaaagagttcaaggcttgatgaaagtactcaatttacaagctaaaatgcgacagaaacgaaaataaaggagacgttggtaagaaggcagagaatctcattcaaggccaatttgaaggctctaaaacaatggaaaagtgctacacagatgtgacagaatttgccattccagcaagtactcaaaagctttacttatcaccagttttagatggctttaatagcgaaattattgcttttaatctttcgacttcacccaacttagaacaagtacaaacaatgttagaacaggcattcaaagagaagcactacgagaatacgattctccatagtgaccaaggctggcaatatcaacacgattcttatcatcggttcctagagagtaagggaattcaagcatctatgtcacgcaagggcaacagccaagacaacggtatgatggaatctttctttggcattttaaaatccgaaatgttttatggctatgagaaaacatttaaatcacttaaccaattggaacaagccattatagactatattgattactacaacaacaaacgaattaaggtaaaactaaaaggacttagtcctgtgcagtacagaactaaatcctttggataaattaattgtctaactttttggggtcagtacaaaactcttgctactatgcgttttattattgaaagacttattggactttctctcaaatcgagtttttactcaattttcttacttgattgggattgaaattccaattaatttctctgagtagagtgtcttgatattggcttcatcaacagaggccttatcaattttacgtttcaagaaaaattcttgaatggtttcgatttcaggctcacgaatagcacggtgtttgtttgagatgaggatttcatagtgaagcggagcttgggtaaaaataacatctgtattccctgcagaataaacctcaacaagggttgcatcggtactttctagctgactttttacaagttgcgagtgtgagtttgtcgtattgataagcttcataatatttcctccgattttctaattctattatagcactttttgaataaagtcgcttgatttatactcaatgaaaatcaaagagcaaactaggaagctagccgcaggctatacttgagtacggtaaggcgacgctgacgtggtttgaattttattttcgaagagtattagccaatcttatgctgttttttccaagattcaatggcccatttatggctaccacgtttaaggtttttgatagcctcgtcaatagggaaccaggcaatatgattaaagttttctagtggcttttgtacttctttgaaaggagttgcttcatagaggtaggcaggattgtagtagtaggtatcacgatgacgagaatagaaatattcgtcagcttgtccgtaataggtaccaatttctgctgtgaaaccaagctcttcaatcaactcatgctttagggcttcctgatgattttcacctgcttcaatttctccacatggtaggaaccaagcaccatttggttcttgaacaagaacaatttgtttttgttcaggattagggataactgcatatacgccatagcgagcaatatagtctgtattcactttttttctccgaaagttgggtttgccattgcattttcctcattatctagtatcgttattattatagtgaaatgaaccaaaaatagtacacaatgtggtataatcttcttatggcatattcaatagattttcgtaaaaaagttctctcttattgtgagcgaacaggtagtataacagaagcatcacacgttttccaaatctcacgtaataccatttatggctggttaaagctaaaagagaaaacaggagagctaaaccaccaagtaaaaggaataaaaccaagaaaggttgatagagatagacttaaaaactatcttactgacaatccagacgcttatttgactgaaatagcttctgaatttggctgtcatccaactaccatccactatgcgctcaaagctatgggctacactcgaaaaaaaaaagaactacacctactatgaacaagacccagaaaaagtagccttatttcttaagaattttaatagtttaaagcacctagcacctgtttagattgacgaaacaggattcgatacttatttttatcgagaatatggtcgctcattaaaaggtcagttaagaagaggcaaagtatctggaagaagatatcagagaatttctttggttgcaggtctaacaaatgaatggtgagttaatcgctccaatgacttacgaagagacgatgacgagcgacttttttgaagcttggtttcagaagtttctcttaccaacattaaccacaccatcggttattattatggataatgcaagattccatagaatgggtaagttagaactcttgtgtgaagagtttgggtataaacttttacctcttcctccctactcacctgagtacaatcctattgagaaaacatgggctcatatcaaaaagcacctcaaaaaggtattaccaagttgcaataccttttatgaggctcttttgtcttgttcttgtttcaattgactatagcagattgaaataagatgagaacaaatcgattgggaaagtaaaattaatttctataaatgttttagcaattgtttcgtactatttcagattcagtctactatatatcataatggacaaagggcaagctgtcaagaaattacagttattttagtaaaaaaagaagcagaaaaatttcattttctactccttttttataggatttatttttctttttcagaacttttaacttcagcttttttggcagatttaatctgaatgtttcccttgctagtcataactgctttgagatctttttcgcttggattttcaaggtagtagtcagtgattgtgtcctcaatatagtcttgaatagtccgacgaagtgggcgtgctcccatttttggatcataacctaggtcaaccaacttttccttgaccttatcagttacatccaaacgaatgttgttgctagagaggcgcttgttaacatctgctagcatgagctcgacaatctgaaggaggttatccttgctgagagccttaaattcgataatgccatcaaaacggttcataaactctgggctaaagaagttaccgagttcaccgaggacagaattggtacgtccttctctagcagcaccaaatccaacgctagcttcggtctttcctgtacctgcatttgaggtcatgataatgatggcatccttgaagctaacggtgcgtccttgcccgtctgtcaaacgaccatcgtccaagacttgaagaaacatgtgcataacatctgggtgagctttttccacttcatcgagaaggatgagagaatatggattgtggcgaactttttcagttaattgaccagcctcatcatagccaacataacctggaggagcgccgaccaacttagccacactatgtttttccatgtattcactcatatcaaagcgaatcatactatcagcagaaccaaaaagttcgatagccagttgtttggaaagttctgtcttaccgacaccagttggcccaacgaagaggaagcttccgattgggcggttaggggtaccaagtccgacacgattacggcgaatagccttggcaatcttatcgactgcatcatcttgaccaataacatgagacttgagatcttcggctagatggatgagttgagattgttctttctctttcaaatcaccaacagggatattggttttctgctcgataatgtgctcaatagttttctcgctgatgctaggagtatcctggtctgtgatctttttcttttgcatttccttatacttggcaatctggtcgcggaagtaggccgccttctcaaaatcttcttctcgtgtagcttgagacttgagattttcagcctcaatcaagcgctgatcaattactttaggatccacaaaattcaaggtcaagttcatcttagaaccagcttcatctaggaggtcaatggccttgtcaggcaagaagcgatcttggatgtagcgattggaaagagttgcagctgcttcaatcgcagcatctgtatattgaacgtggtggtaatcttcgtatttcttttgaatccctttgagaatagtgattgtttcgtccaccgttggttcatcgactttaacaggctgcatacgacgctcgagggcagcatccttttcaatgatacggtattcattgagggtagtagcaccgactagttgcagttctccacgagcaagggctggcttgaggatatttcctgcgtccatattaccatcactcgcagaaccagcaccaacaatttcatggatttcatcgataaagaggatgatgtcttcacgtttgcgaatttcttccatgagtttttgcatgcgttcttcaaattgtcctcgaatccccgttccttgaactaagctaaccacatccagacggatgacttgtttaccttggagtttatgtggcacatcgccatcgacaattttctgagctagaccttcgacaacggccgtttttccgacaccaggttcaccgataaggacaggattattcttggttctacgattgagaatctcgatgacacggataatctcatcgtcgcgcccaataacggggtcaatgtctccacgacgggcaatttcagttacattaataccaaattcttccagcaggcctttttcttggctaggtggcggagtttgagcagatccacgattttgggaaccataaccgccgtttccaccgtaacctccacctgattgggttgggggaataggaggagtattgctagaaggtctgaaattgtttagatcattgaagaaatcaccaaagggatcgaagtcacgattgttcagatccgtcatacctttgaagaggctattgttaggatctgttttgataatcttatagcagttttgacagaggtcaatttgtttttgttttccattgagattggtgtaaagatgaattgttgagtcgttaattttacagttttgacaaagcatacatctacctcatttctttctttagcctgacttgtttaaaggtcaaaaatagtcaaattctatactctcattataacaggattggggtgtaaagcaagtaaaaagattgaagctttgagaagttgttacaatgaaaatttttgtgaatttggactataaaaaaatcctatttgtgagacaaaaaggattttacttagacatgcagggacaatcccagcttgttttagattagtagagaagttcgtaaatttccattgcgattaagtcaatgctatcaaacgtatacgtttcgcgatcttctacgtcacgaagggtaaagattgggccgttttcttcgtcgtggctgtacgcaacttctgcaacaacaactccttcgcgttcaaaattacgttttaaatttccgccatcgtttgccattgcttcaaggcggttgatgattctaaccaaatgtgattccattttgattctccttcatttcttatcgttactattttaccataaaggaggccaacttgactagaaaaaactaagatttctcgctaattctgctagtttaaatatttttaaataaattggataaaaaatttaaattttaattcaaaacatgttataatcatacagtattctattttagaaagcagtgtgactatgaatttttcttttttacctaagtatttaccttattttaactatggggctgttgtgacgattcttatttctatctgtgttatctttttgggaactattttgggtgttgtcttggcttttgggcaacgttcaaagtttaaaccgcttgtttggttggccaacttgtacgtttggattttccgtgggacaccgatgatggttcaaattatgattgcctttgctcttatgcatatcaatgctccgactattcagattggaattttaggtgttgatttttcgcgtctgattccagggattttgattatctctatgaatagtggtgcttatgtttcggagactgttcgtgccggaatcaatgcggttccaaaaggtcagctagaagcggcttattcgctagggattcgtcctaaaaatgcgatgcgttatgtgattttgccacaagcagtcaaaaatatcttgccagcattggggaacgaatttatcaccattatcaaggacagctccctcttatcagctattggggtcatggagttgtggaatggggctacaacagtttctacaacaacctatctacctttaacaccacttttatttgcagcattttactacttgattatgacctctattctgacagtagccttgaaagcttttgaaaaacatatgggacaaggagataagaaataatgacagaaaccttgataaaaattgaaaatttacataaatcctttggaaagaatgaagtattgaagggcatcaacctcgagattaaaagaggagaagttgtcgttatcatcggtccttcagggagcgggaaatctaccttgcttcgctctatgaatttgttggaagaagcaaccaaggggaaggttatctttgagggagtcgatattacggacaagaagaatgacctgtttgccatgcgtgagaagatgggcatggtttttcaacaattcaatctctttcctaatatgactgtgatggaaaatatcaccttgtcccctatcaagaccaaaggtgacagtaaggccgttgcagagaaaagagctcaggaacttttggaaaaagttggtttgccagataaggcagacgcttatccacagagtttgtcaggtggccagcaacagcggattgccatcgcgcgtgggttggctatggaaccagatgttttgctctttgacgagccaacttcagccctagatcctgagatggttggagaagttctggctgttatgcaagatctagccaagtcaggaatgaccatggttatcgtaacacatgagatgggatttgcccgtgaggtggcagatcgtgtcatctttatggcagacggtgtggttgttgaagacggaacacctgagcagatttttgaacaaacccaaggacaaaggactaaagacttcttgagtaaggttttataagttagctttgtttagctatttgtagccagctttaaacgttaaagagaagattagtgaaaagctcaaccagagctttttcttatagtttaaagctataggattgcctaggaaagaagtgttagagctacattgtattttttggtataattaaagatatttgtaagaaaagagaagtgatatgacacagattattgatgggaaagctttagcggccaaattgcaggggcagttggctgaaaagactgcaaaattaaaggaagaaacaggtctagtgcctggtttggtagtgattttggttggggacaatccagccagccaagtctacgttcgcaacaaggagaggtcagcccttgcggctggtttccgtagcgaagtagtacgggttccagagaccattactcaagaggaattgttagacctgattgctaaatacaatcaggatccagcttggcatgggattttggttcagttgccattaccaaaacacattgatgaagaggcggttctattggctattgacccagaaaaggatgtggatggtttccatcctctaaacatggggcgtctttggtctggtcatccagtcatgattccttcgacaccggcaggaattatggaaatgttccatgaatatgggattgacttggaaggtaaaaatgcagtcgtcatcggtcgatccaatattgtcggaaaacctatggcccagcttcttttggcaaagaatgcaacagtaaccttgactcactcacgtactcataatctttccaaggtggctgcaaaagcagatattctggttgttgcaatcggtcgtgccaagtttgtgactgctgactttgtcaaaccaggtgcggtagtcattgacgttgggatgaaccgcgatgaaaatggtaagctctgtggggatgttgattatgaggcggttgccccacttgctagccacattacgccagtccctggaggtgtcggtcctatgaccattactatgctgatggagcaaacctatcaggcagcacttaggacattggatagaaaataagataaaaattttctgaggaaagtgtattttctatagctatatctaaaatgatagaaatgaatattaaattttagaaataagtttataaaaggaggtttgcgcctcctttttgttgtataatggagtgaggtgattagatgattttaaaaatttataatggggaatatagtttacaatgggatggaatatactacttagcactaattgattatccaaatattcaagagtgggaattagaaaaaattgctaaatttatagcttacgaaaaacttcataaacgtcaaacaagtattgagtgtgctgattcttgtttaaaaaaagaaattttagattacatctgtcagcatccctttctgccaccatttactcctacagataaaagagtagcctcgacttatgacctacataagaggttagtgacttcagactactgtagtcatactacgactatagatgcagcgatttctatttttaaaactggtcgtcttttatctgctgtgaaagcctttgggcgagatgctgaggagttggttttggatagtcgaaatgctgcatctgatccgatagattattttgactatgtcatgttagggtggtcaaatacaagttctggttatcgattggcgatggagcgtttattaggtcgagctccttcagagaaagaattacaagacaagtttattcctggagtaagttttcattttatctatacagatttgattaaagttcctggttatatttttgatggttaccatgctgtaaaaattaaggacatgcttaatttattaagtgagttgtatatttgcattattccaactcataataagagccaatttgaaaatattattccaaccaaaatacaagatagggtgtattatcttgactatgctggagaagacttagaagagtggactaagaaagtctatcaagttgttttaaaacaatcagataaaggatagttgaggaaaaaacgatgaaagtgattgatcaaaccttactagaaaaagtcattattgaacgttcttgtacaagtcataaaggagactacggtcgtctgctgttgcttggtgggacttatccttatggtggtgccatcatcatggctgctttagcagctgtaaaaagcggtgcaggattggtaaccgttggaacggacagggaaaatatccctgctctacacagccatttgcctgaggctatggccttttctctgcaagatcagtaattgttacaagagcaattggagaaggcagaagttgtcttgctggggcctggtttacgagacgatacgtttggagaaaatcttgtaaaacaggtctttgctagcttaaaaaagaatcagattttgattgtagatggaggggccttaaccatccttgctaggacaagtttgttgtttccatctaaccagcttatcttaactccccaccaaaaagaatgggaaaaactgtctggtattgctattgaaaagcaaaacgaaggtacaacatctagtgccctgacttctttccctcaaggaacaattttggtagagaaaggtccagctactcgtatttggcaagttggccagtctgattattaccagttaaaggttggcggtccctatcaggcgactggtggtatgggtgatacactggctggaatgattgcaggatttgcaggccaatttcgacaggccagtctctacgaacgtgtggcagtagcaacccatcttcattcagccatagcccaagaactatctcaagaaaattatgtggtcttgccgacggaaattagtaattgtcttcctaaagtaatgaaaagatatgtctaaaatagttagacaaaaaatgttgataatttgtatcattattcttaattcacaaaaaacgaacgtttagtattcttcttgctaagaaactaaatttgttcgtttttttactcttgtaaatctatttttgttagagttgatttggtttacatccgtacttaaattgatttgttagagctctacttttattaaaaaaattcaatttcaaggataaataagcagtattctaaaggtacttttagatgaaataaaagcctttacatggtataatagaggtagctctttaatggaggtgtttgagtggaaaatctgaagaaaatggcaggtatcacggctgctgaatttatcaaggatgggatggttgtagggctaggaacaggttctactgcctattattttgtcgaagaaatcggtcgtcgaatcaaggaagaaggcttgcagattacagctgtgacgacttctagtgtgaccagtaaacaggctgaagggctcaatatcccgctcaagtctattgaccaagtagactttgtcgatgtgacagtcgacggggcggatgaagtggatagtcagtttaatggaatcaaaggcggtggtggtgcccttctcatggaaaaggtggtcgcaacaccatcaaaagaatacatttgggtggtggatgaaagcaagctggtcgaaaaactaggtgcttttaaattgccagtagaagtggttcagtatggtgcagagcaggtctttcgtcattttgaacgagctggctacaaaccaagtttccgtgaaaaagacggccaacgttttgtgaccgatatgcagaattttatcattgacctcgccttggatgtcattgaaaatccaattgcttttggacaagaattggaccatgtcgttggtgttgtggagcatggtttattcaaccaaatggtggataaggtaatcgttgctggacgagatggagttcagatttcaacttcaaaaaaaggaaaatagaagggggcataagatgtctaaatttaatcgtattcatttggtggtactggattctgtaggaatcggtgcagcaccagatgctaataactttgtcaatgcaggggttccagatggagcttctgacacactgggacacatttcaaaaacagttggtttgaatgtcccaaacatggctaaaataggtcttggaaatattcctcgtgaaactcctcttaagactgtagcagctgaaagcaatccaactggatatgcaacaaaattagaggaagtatctcttggtaaggatactatgactggacactgggaaatcatgggactcaacattactgagcctttcgatactttctggaacggattcccagaagaaatcctgacaaaaatcgaagaattctcaggacgcaaggttattcgtgaagccaacaaaccttattcaggaacggctgttatctatgattttggaccacgtcagatggaaactggagagttgattatctatacttcagctgaccctgttttgcagattgctgcccacgaagacattattcctttggatgaattgtaccgtatctgtgaatacgctcgttcgattacccttgagcgtcctgcccttcttggtcgcatcattgctcgcccttatgtaggtgaaccaggtaacttcactcgtacggcaaaccgtcgtgacttggctgtatctccatttttcccaactgttttggataaattgaatgaggctggtatcgatacttatgctgtgggtaaaatcaacgatatctttaacggtgctggtatcaaccatgacatgggtcacaacaagtcaaatagtcatggaattgatacactattgaagactatgggacttgctgagtttgaaaaaggattctcattcacaaacctagttgactttgatgccctttacggccatcgtcgtaatgctcacggttaccgtgattgcttgcatgagtttgatgaacgcttacctgaaattatcgcagctatgagagagaatgaccttctcttgattactgcggaccatggaaatgacccaacgtatgcaggaacggatcacactcgggaatatattccattgttggcctatagccctgcctttaaaggaaatggtctcattccagtaggacattttgcagatatttcagcgactgttgccgataactttggtgtggaaactgctatgattggggaaagtttcttagataaattggtataagatgacgcgctatgctttgctggtgagaggtatcaatgttggtggtaagaataaggtcgtcatggcggagcttcgtcaagaattgacaaacttgggactggaaaaggttgagagctacatcaatagtggcaatattttctttacttcgatagattccaaagcccaattggttgaaaagctagagactttctttgcagtccattatccatttattcagagcttttctttactgagtctagaggactttgaggcggaacttgaaaatctaccagcttggtggagcagagacttggcacgaaaagattttctcttttacactgagggtttggatgtggaccaagtcatcgcgacagttgaaagtttagagctgaaagatgaagtgctttattttggaaaacttgggattttctgggggaaattttctgaagaatcctattctaagactgcctatcataagtacttgctgaaggtgcctttctaccgccacattactattcgtaatgctaaaacctttgacaaaattggtcaaatgctaaaaaaataataaaggagacacacaatgacatttttaaacaaaatccatgaaactgctactttcctgaaagaaaagggaattgcagcccctgagttcggtctaatccttggatcaggacttggagaattggcagaagaaatcgaaaatccagttgtagtagactatgctgagattccaaactggggccgttcaacagtagtcggtcatgctggtaaattggtatatggtgaactggcaggtcgcaaggtcttggctcttcaagggcgtttccatttctatgaagggaatcctctggaagtggtgactttcccagttcgtgtgatgaaagttcttggatgtgaaggtgttattgtaaccaatgcagctggcggtatcggatttggtcctggtaccttgatggctatctcagaccatatcaacatgacggggcaaaatccattgatgggtgaaaacttggatgactttggcccacgtttcccagatatgtctagggcctacacaccagaataccgtgccactgcccatgaagtggctaaaaaacttaatatcaagcttgatgaaggtgtctatatcggagttactggtccgacttatgaaacaccagcagaaattcgttcctataagacactgggagcagatgcagttggtatgtctacggttcctgaagttatcgtggcagcccactctggcttgaaagttctgggaatttcatgtatcactaactttgcggccggtttccaagaagaactcaatcacgaagaagttgtagaagtgactgaacgtgttaaaggtgatttcaaaggcttgcttaaagcgattcttgctgaattgtaagaaaaaagatttaaaagggggagtgcctctgttttttcaggattgactgcctatccggattaaagaagaaacagaggaatactatgagcttcttcctgctcttataactgaaagaagcggaagaataggtatgtctgatctgatagccagcattgtgaaagacaagattctaggatactagcattagcttcctagccaagcagactagtatgataaggagagatgagaatgaattgactttctgaatttctcagtcttatcatatatagcacaatgagatttcgcttgagtctgcttgtaaataaacgaaaagaaagataagaaataatgaaaattggtcaacgaattatgcgctttggcataaaaaattaagtatcggagttgtatctgttgtagtcggctttgatttctagctccagctggaatttcagccaatgaagtaaagcaagatgtaacatctgaagtggtaataggtgtgctagattctaaggaggaattgaaagagtcagaaaatgatgctccaaaactagaaactcctcttagagaggagccaagactagctcctcaaacgcttccggaagcaagtgaagttcttgaaaacaaaagggaagagtcaaaagtagagataacataaccagctcaagcggatgatatccgcaaggttgttggggaattagccaaggatataagtattactaagttgtatatgacaggtcattctcttggatgttacctagctcagattgcagcggttgaagcttaccaaaaatatcctgatttttataaccatgtattgaggaaagtgacaactttcagtgctcctaaagtgattacttccagaactgtttggaatgctaagaatggtttctgggatgttggtttggaaagtcgtaaattagctgttagtggaaaaattaagcattatgtggttgataatgacaatgttgtgactcccttgattcataataatcgtgatattgttacatttacaggtaattcacgctttaaacaccgttctcgtggctattttgaaagtccaatgaatgatattcctaactttaatattggtaaacaagctaccttggataaacatggttatcgtgatccgaaattggataaagtgcgattctttaagaaacaggctctgcctcgatcttctagtcaaccaagcgctgaaccaatggaaaatattgcctcaggaaaacaggttactcaaagttcgacagctttcggaggagatgctagaagagctgtggatggcaaagtcgatggtaactatggtcacaattctgtcactcatacaaacttccaatctaagccttggtggcaagtagatttggctaaagaagaaaccattcgccaaatcaatatttacaaccgaacagacactgcccaggatagattggcaaactttgatgtcattcttttagacagttctggtaaagaaattgagtgaaaacgtataacatctcctaaagatgtgtcagcacaaattacgattaaccataaaaaagcgcgctatgttcggattgagctagaaggctataatgccctcagtcttgcagaagttgaagttttctgctttatagctacgaatgctgaaacggcgacacaagtttctaagccagttcaaccaatcagtcagactcctgtgaaggataaaacattgacaattcaacacagtggagcttacattgcccgctactccataacttgggaagaagttccagtagataaagatggaaaccaagttgttcgtagtcattcttgggaaggaagcggtcgcaaccagactgcaggttttgtcctcaacctcccaatcaaagaaaatatgagaaatctgcgagttaagattgagaaaaagacgggcctactatggaatagatggcaaacaatctatgaaaacagaccaattttagctcaaccccaccgtaaaattacccattggggtacgacattgaattccaaggtgagtgacgatgatgtcttgtaatctgatggtagaatgacagttagtttgtctagtttataagaaagtactacctgagcttgaataggactcaggtagctctctatgaaagaacaaaattaatactcaatgaaaatcaaagagcaaactaagaaactagccgcaggttgctcaaagcactgctttgaggttgtagataagactgacgaagtcagtcacatatataatccaaggcgacgttgacgtggtttgaagagattttcgaagagtataaacagaaaggtagagcgcgtgttctaatttgaacacgagtagaaaacttttctaaaaacaaaaacgaaaggatgggtaaactgtattcgctgaactgaatacgggcgactctcctctaaatcaaaattaagaaaggaattgaccccaccctaaaagtagtgggaaaaagatagttgatctagcgagcatcgctcactgcgcccaactcctattttcccttcgctttttgatgggtttggtatctttctcaatataaaatataaaataaagaaaggtagagcgtgtgttttgatttgaacacgagcggaaaactcggaaaatagataatctgactgaaaaatcaggatttctcgtcaggttcctaattttcagtcgttttcttctcgctctttgtatcataaattatgtctatccatattgctgctcagcagggtgaaattgctgataaaattcttcttcctggggatcctcttcgtgctaagtttattgcggagaatttccttgatgatgctgtttgttttaacgaagtgcgtaacatgtttggttacactggtacttacaagggtcactgtgtatctgtcatgggaactgggatgggaatgccatctatttcgatttatgcgcgtgagttaatcgtagactacggtgtgaagaaattgattcgtgtgggaactgcaggttctttgaatgaagaggttcatgttcgtgaattagttttggcgcaggcggctgcaaccaactcaaacatcgttcgtaatgactggccacagtacgattttccacaaattgctagctttgatttgcttgataaagcctaccatatcgccaaaaaacttggtatgactactcacgttgggaacgttttgtcatctgatgtcttttactcaaattactttgaaaagaatatcgagcttggtaaatggggagtcaaggctgtggaaatggaagcagcagctctttactatcttgctgcccaataccatgttgatgcgctagctatcatgaccatctctgatagcttggtcaatccagacgaagacacaactgcagaagaacgtcaaaataccttcactgatatgatgaaggttggtttggaaaccttgattgcagaataattatagccaaaaaggggctctttgtcaactgtagtgggttgaaaaaaagctaagcttgagaaaggacaaatttcgtcctttcttttttgatattcagggcgataaaaatccgttttttgaagttttcaaagttccgaaaaccaaaggcattgcgcttgataagtttgatgagattattggtcgcttccagtttggcattagaatagtgtagttgaagggcgttgacgattttctctttgttctttagaaaggttttaaagacagtctgaaaaagaggatgaacctgcttcagattgtcctcaatgagtccgaaaaatttctcagggtctttgttctgaaagtgaaaaagtaagagttgatagatctgatagtggtgtttcaagtcttctgaatagcttaaaatcttgtcaagaatttctttatttgttaagtgcatgcgaaaagtagggcgataaaaacgtttatcgctcaatttacgactatcctgttggatgagtttccagtaacgcttgatagccttgtattcatgagattttcgttcaaactgattcataatttgaacacgaaaacgactcatggcacggctgagatgttggataatatggaaacgatctagaacgattttagcacacggaaaaagctgtttagccaagtcatagtaaggactaaacatatccatcgtaatgattttcacttgacaacgaacggctctatcgtagcgaagaaagtgatttcggatgacagcttgtgttctgccttcaagaacagtgataatattaagattatcaaaatcttgcgcaatgaaactcatctttcccttagtgaaggcatactcatcccaagacataatctttggaagccgagaaaaatcatgctcaaagtgaaagtcattgagcttgcgaatgacagttgaagttgaaatggccagctgatgggcaatatcagtcatagaaattttttcaattaacttttgagcaattttttggttgatgatacgagggatttggtgatttttctttaccaggggagtctcagcaaccatcatttttgaagagtgatagcacttgaaacggcgttttctaaggagaattctagaaggcataccagttgtttcgaggtaagggatcttagacggtttttgaaagtcatgtttcttcattagacttccacaatcagggcaagatggagcctcataatccagcttagcgataatttctttgtgggtatccatattgatgatatctagaatcttgatgtttgggtctttaatatcgagcagttttgtgataaaatgtaattgttccatatgattctttctaatgagttgttttgtcgcttttcattataggtcatatgggactttttttctacacaaaaataggctccataatatctatagtggatttacccactacaaatattatagagcccaaaaaggaagccctttatgaattgtaggacttccttttcttatccagaaattgatctagctctctctgatttcgaagaatagtgactttatgtgaatattcttggcaaagtttttggtaattttctttttgagttttgctacgcccatcccaaagaatccatctgataaactcccactcaaagcgttcagggcaatctaccgccatactttctctgacttttccacggtatttaagataacgcttaaaggctctaaagagacaggtcaatggcgaaaaattgagaaagatgatttggtcagcttcttgcattcgttcttggtagtagcaccaagaataattaccatcgatgacccaagctttatgcttggtgagaaagttttttatctcggttaacatccattcgcagtcactgtcttgccaaccaggttgaaattggagtgtgtccatgtgcagttttggaatggagtagtagttagataacttttctgctatagttgacttaccagaaccagaatatccgataattgcgattttcattttctaccttttcctatttggagacaaaaaaacagcctctatggactgtttcttatttaacaagtttagctgaaagacgagctttatcgcggcttgctttgtttttgtgaatcaaacctttagtttctgctttatcgatagctgagctagcagcacggaaaagttcttcagatgggtttgcttcgaaagcttttatagcagtacgcatagctgatttttgagctgagttcttttcgttttgtttaacgttcaattcagcgcgtttgatagctgatttaatgtttgccaatgttcttacctccatatttactaactataccattatatatgaaaacttacgttttgacaagggaaaattacttttttaagtaaatttcatcgatttcatggttcttgcttttatgaagaatcacttctgcacgatttctggttggttcaatataattttgcagatttgtgagattgatactgatccagacctgatgggcaaaggactccacttccccaatcggcatctgagtaaaacgataatagtagctatcagggtcgttttgggctagactcagcattttcaagaaacggtccagataccaactttcaatatcatccactccagcatctacatagatggaaaagtcaaagaagtcagtgatatagagacgatcgttttgtggattttgaaagacattgattccctcaacaattacaaaatcagcagctttgacactttgtttctcttcgggtacgatgtcgtaaacttcatgagaatagacaggaatatctacatcttgtccatttttgatgcggtccaagaagttgagaagagcttccatatcatagctttcaggaaatcctttacgatttaaaatcccctgctcaatcaaggtttgattgggatagagaaaaccatcagttgtaaccaactcaaccgtagcatctgtaaacgtacgggacagtaggatttgaagtaggcgactggttgtggattttccaacggcaacactcccagaaaccccaataataaaaggttgagatttactttcacgttggaggaaaattccttttgaaaaggctaaatcttccttagttcgcttgtaaatctgaatcaaatgagccaaggggagatagatatctgtaacgtcttggagactgatttggtcattaaaactcttgatagattccaattcttcttctgtcaaaggaggtgttgtctttcgatgtaaagattgccaagtctggcggctgattttttcaaaatgtaaaaattcgttggtcatttgttttcccctagatattttgtctatcataccataaaaagctaaaaaaataaagcggtttcttgaatgtggtaagtcaatggtatatagtataagtgatcaatttattgatgaaataggagatagattctactgatttataagcttataaagggggctttttagttcacaacttataggaggtgtactatgaaaatcttaaaacgttacatattggaactctgttttattttaagttttgctttaccttttataaaaggaaccaatgcagataatggtagatgctttgtggaaacctattacggttttacttttttgatggaacatgctattgtaacagctgtctttatttgttcgttcttaattgctttcttactaaaaaacgatggacgaaatggattgctgcgggtagttattgctttttagtcctacggattgcgacagagggttatttcttccacatgtcactagaagatttgatacgactttggacaagtttggaaatcctgacataaacgtatcagttgggcttttatctaaacattttgttaggaattttgttgataataaagtattttaaggttaagcaatagaaataataatctgcctgattatagatgataaactttttgtttttatctggactgtgatatttatagttctaaatggtttattatttataagtgttgaaagagattgaagaaaatggcttcgtgacttgctttcttcggtctttttcgttttattatcaatttgtaaacgatttacaatttgagtcaaattatggtaaaatagtgtcatgagtaaaatgtactatgcagaaaatcctgacgctgctcacgacattcatgagttgagagtggacttgttgggagaaaaaatgacttttttgacagatgcgggtgtttttagcaagaaaatggttgactttggaagtcaactcttgctcaagtgtctggatgtcaaccaaggagagacagtcctagatgtaggctgtggttatggtccattaggtttgtccttggtcaaggtttacggagttcaggcgaccatggttgatattaacactcgtgccctggatttagctcagagaaatgctgaaaaaaataatgcaaaagcgacgatatttcaatctaatatttatgcaagagttcaagggcgatttgaccatgtcatttccaatcctcctatccgtgcgggcaagcaagtcgttcatgaaatcatcgagaaaagtaaagatttcttggaaattggtggagatttgaccatcgtcatccagaaaaaacaaggagctccaagtgccaagtctaagatggaagatgtgtttggcaattgtgaaatccttaaaaaagacaagggatactatatccttagaagtgtgaaagaatgagagcagttgatttaatccaaaaaaaacgagacggtcaagaactgacttcaagtgaaattgaatggctgatagaaggctatgtatcaggaactgttcctgattatcagatgtctgcctttgctatggctgtttattttaaaggaatgacgactcgagaaatctctgatttaacgatgaatatggttaagactgggcaagagtttgacctgtcagccattgatggtgtgaaagttgacaagcattctactggtggtgtcggcgataaggtaaccttgattttagctcctcttgttgctagcttcggtgtgcctgtagcaaaaatgagtggtcgtggtcttggccatacaggcggaacaattgataaattggagtccattaagggctatcaagtagaacgtagtcaagaggattttattcgtcaggttcaggatattggagtatctgtcattgggcaatcagaccagctggtcaaagcagataagcttctctatgcccttcgtgatgtgaccgcaactgtcgacacgattcctttgattgcgagttcggtgatgagcaagaaaattgcggcaggggcggatgctattttgctagacgtgactgtcggtgagggtgccttcatgaagacggttgatgaggcgcgtgagttggctcaaactatggtagatcttggtaaggttgttggacggaagacagtagcagtgattacggatatgagccagcctttgggacgagcgattggaaatcgtctggaaatccttgaagcattggagattttgcaaggtcaaggacgtcaggatattacccactttatttgtgaattggctcaaattatgcttggtttggcaaatgttaacaaaactgttgaagaagttcaccaacatcttgagaatggtcaagcactggctaagtttgaggaaatggtgcaagcccaaggtggagacttggaagacctctatcgtcctgtaaatgtagctcatgtggtggaaatccctgctcaggaaacgggtgtcatttcagctcttccagctatggactttggtctttatgccatgaggctgggtgctggtcgtgcagttaagtctgatgccttggactatgaaacaggaattgtttttgaaaagaagattggagactccgttcaaaagggtgaaattgttgcaaaagtatacacaaatgaaaaaattccacctcaactagttacagatttccaaaaatgtgttaaaataagtgatgaagtgaaaaaaatccgtgaaattgtagaaatcatctcctaaatggagggaaaaccgaaatgaaattaaataaatatatagatcatacgcttttaaaacaagatgcaaagaaaaaacaaattgatagtttgttgtctgaggctagagagtatgactttgccagtgtttgcgttaatccgacctgggttgaacatgctaaaaaaggacttgaaggcacagatgttaaggtttgcacagtagtaggtttccctttgggagcaacaacttcagccgtgaaagcatttgagacaaaagaagctatccaaaatggtgcagatgagattgatatggtgatcaatgttggagctctcaaatcaggtaatttagccttggttgagtcagatattcgcgcagtagtggaagcaagtggtgataagttagtgaaagtcattattgaagcttgccttctgacagaccaagaaaaagttgttgtttgccaattggcccaaaaagctggggctgactttgtcaaaacatctactggcttttcaactggtggtgctacgatagcagatgttacattaatgcgtgaaacagttggatctgatatgggtgtcaaggccgccggtggagctcgttcttatgcagatgctcttgcctttgtcgaagcaggtgcgacccgtatcggaacgtcagctggggtagctattttaaaaggagaattggcagatggcgactactgagttgattgaactggcaattgaaaccagcaaacatgcctatgtcccctattctcactttcctatcggagcagttttagtagctaaagacggaagtgtttacacgggagtgaatattgaaaatgctagctatcctttgaccaattgcggtgagagaacagctatttttaaggctatatctgaaggccaaagagaattttcagaattgattgtctatggtcaaactgaaaaaccgatctcgccatgtggtgcttgtcgccaagtgatggctgaattttttgaacaagatctaaaagtgaccttagtcgcaaaagataaatcgacggtcgagatgacggtcggggaattacttccatactcttttacagacttaaactagtctgagtcgctctctgagtggcacggtccttgtggccaaccaatccatacttgcaacatcgttgcacatcttatttaggaggttcagtaatgaacaagaaacaatggctaggtcttggcctagttgcagtggcagcagttggacttgctgcatgtggtaaccgctcttctcgtaacgcagcttcatcttctgatgtgaagacaaaagcagcaatcgtcactgatactggtggtgttgatgacaaatcattcaaccaatcagcttgggaaggtttgcaggcttggggtaaagaacacaatctttcaaaagataacggtttcacttacttccaatcaacaagtgaagctgactacgctaacaacttgcaacaagcggctggaagttacaacctaatcttcggtgttggttttgcccttaataatgcagttaaagatgcagcaaaagaacacactgacttgaactatgtcttgattgatgatgtgattaaagaccaaaagaatgttgcgagcgtaactttcgctgataatgagtcaggttaccttgcaggtgtggctgcagcaaaaacaactaagacaaaacaagttggttttgtaggtggtatcgaatctgaagttatctctcgttttgaagcaggattcaaggctggtgttgcgtcagtagacccatctatcaaagtccaagttgactacgctggttcatttggtgatgcggctaaaggtaaaacaattgcagccgcacaatacgcagccggtgcagatattgtttaccaagtagctggtggtacaggtgcaggtgtctttgcagaggcaaaatctctcaacgaaagccgtcctgaaaatgaaaaagtttgggttatcggtgttgatcgtgaccaagaagcagaaggtaaatacacttctaaagatggcaaagaatcaaactttgttcttgtatctactttgaaacaagttggtacaactgtaaaagatatttctaacaaggcagaaagaggagaattccctggcggtcaagtgatcgtttactcattgaaggataaaggggttgacttggcagtaacaaacctttcagaagaaggtaaaaaagctgtcgaagatgcaaaagctaaaatccttgatggaagcgtaaaagttcctgaaaaataatggatggaagtcatttcttaggaagcggccaagggccgcttttttaagagttgagacaaagtcattttgtctaagtaaagcttgctactagacaaactagcaagttttattgaaataaaataagactctgaaaggaagagcacatggcacacgaaaatgtcattgagatgcgtgatattaccaaggtgtttggtggatttgttgccaacgacaaaatcaacttgcacctacgaaaaggtgaaattcatgcacttttaggagaaaatggggctggtaagtccacgctaatgaacatgttagcaggccttcttgaaccaactagtggtgaaatcgcggtcaacggtcaagttgtcaatctcgactccccatctaaagcagctagcttgggaatcgggatggttcaccagcactttatgttggttgaagccttcacagtggctgaaaacatcattttaggtagtgaattgactaaaaatggtgtgctagatatcgctggagctagcaaagaaatcaaggctctttctgaacgttatggcttagctgttgacccttctgccaaggtagcagatatctcagttggagcccaacaacgtgtagaaattttaaaaacactttatcggggggctgatatccttatctttgacgaaccaacggctgttttgactccatcagaaattgatgagttgatggctattatgaaaaatcttgtcaaagaaggaaaatcaattatcttgattacccacaaattggatgaaattcgagcagtttctgaccgtgttacagttatccgtcgtgggaaatcaattgaaaccgttgaaattgcaggggctaccaatgctgatttggcggaaatgatggtaggacgttctgtttcctttaaaacagagaagcaagcctctaaaccaaaagaagtggttttgtctatcaaagatttggtggtcaatgaaaaccgtggtgttccagctgttaaaaatctgtccttggatgttcgtgctggagagattgttggtattgcggggattgatggaaatggtcagtctgaactgattcaagccattacaggtcttcgtaaggttgaatctggtagcattgagctaaaaggagattcaattgtaggcttgcacccacgtcagattacagaactaagtgttgggcacgttccagaagaccgtcaccgtgatggcttgattttggaaatgatgatatctgaaaatattgcccttcaaacctactataaagaaccacatagtaaaaatggaattttgaattattcaaatattacttcttatgctaaaaagctgatggaagagtttgatgttcgcgctgccagtgaattagttcctgcagctgcactctcaggaggaaatcaacaaaaagcaattattgctcgtgaaattgatcgagatcctgatctccttatcgttagccagccaactcgtgggttggatgtcggtgccattgagtatatccacaaacgcttgattgaagagcgtgataatggcaaggctgtccttgttgtcagctttgaattggatgagattttaaacgtctcagaccgtattgccgttatccacgatggtaagattcaaggtattgtatcaccagaaacaaccaataaacaagaacttggtgtcttgatggctggtggaaacttgggaaaggagaagagtgatgtctaaaaaattacaacaaatttcggttcccttgatttctgtattcctaggaattttactcggagccattgtcatgtggatcttcggttatgatgctatttggggctacgaagaattgttctatacagcctttggcagtctgcgtgggattggagaaatcttccgtgctatgggtcctctggtcttgattggtcttggttttgccgttgccagtcgagctggtttctttaacgtcggacttcctggtcaggctttggcaggttggattctcagtggttggtttgccctgtcgcatccagatatgccccgtcccttgatgattctagcaaccatcgtgattgccttgattgctggtgggattgtcggagcgattccaggtattcttagggcctatctagggacgtcagaggttattgtaaccatcatgatgaactacattgtcttgtatgtagggaatgcctttatccatgctttccctaaagacttcatgcaaagtacagattcgaccattcgtgttggggctaatgcaacctatcagacaccttggttggctgagttgactggtaactcacggatgaatattggtattttctttgccatcattgccgttgcagttatttggttcatgctcaagaaaacaactcttggttttgaaatccgtgcagttggtcttaatccacatgcttcagaatatgctggtatttctgccaagcggactattatcctatctatgattatttcaggtgccttggcaggtcttggtggagctgttgaaggtttgggaaccttccagaacgtctatgttcaaggttcgtcattagctatcggatttaacggaatggcggttagtttgcttgcggccaactcaccaattggtatactctttgcagccttcctatttggcgttctccaagttggggctcctggtatgaatgcggcgcaggtaccatctgagcttgtcagcattgtaacagcgtctattatcttctttgtcagtgttcattaccttatcgaacgctttgtcaaaccgaaaaaacaagttaaaggaggtaagtaaagatgtctattataaccttgctccccctcttggtgtcttctatgctgatttactcagcacctctcatctttacaagtatcggtggtgttttctctgaacgtggtggtgtggtaaacgttggccttgaaggaattatggttatgggtgccttttctggagttgtctttaaccttgaatttgcagaacaatttggagcagcaactccatggctatccttgcttgtagcaggattggttggtagtgttttctctatcatccacgcagcagcgacggttcatttccgtgcagaccatgttgtcagcggtacggtattgaacttgatggcgcctgccttggctgttttcttagttaaagttctttataacaaaggacaaaccgacaacctaagtcaaacttttggacgctttgatttcccagtcttggcaaatatcccagtgattggtgatatcttcttcaagtcaactagtctacttggttatctggcgattgccttctcattccttgcttggtttattctctttaagactcaatttggtcttcgtctccgctctgtcggtgaacatcctcaagcagcggataccttgggaatcaacgtctacaagatgagatatttaggggttattatttcaggttttctaggtggaattggcggagcgatttatgcgcaatcaatctcagttaacttctcagtgacaactattgttggacctggatttatcgcccttgctgcgatgatctttgggaaatggaatccaatcggtgctatgctttctagtctcttctttggactttcacaaagtttggctgttatcggttctcaattgccgttcctacaaggagtgccagcggtttatcttcaaattgcaccttatgttttgacaattcttgtcttagcagccttctttggaaaagcagtcgcaccaaaagcagatggtatcaactacatcaaatcaaaataagcatacaaaaaaacgtcagtccaatgactgaactacaccccaaaagttagacagaaaaaatctaacttttggggtgtttttattatgaaattaagttatgatgataaagttcagatctatgaacttagaaaacaaggatatagcttagagaagctttcaaataaatttgggataaacaattctaatcttaggtatatgattaaattgattgatcgttacggaatagagttcgtcaaaaaaggaaaaaatcgttactattctcctgatttaaaacaagaaatgattaataaagtctgacatgaaggctggactaaagatagagtttctcttgaatacggtctcccaagtcgtacgatacttcttaactggctagcacaatacaggaaaaacgggtatactattgttgagaaaccaagagggagagtacctgagagcggagaatgccatcctaaaaaagttaagagaactccgattgaaggaggaaaaagagaaagaagaaagacagaaattgtttaagaattaatgactgagttttcgttagatcttcttttaaaagtcattaaactagctcgttcgacctactactatcacttgaaacagctagataaaccagataaggaccaagagcttaaagctgaaattcaatccatttttatcgaacacaaaggaaattatgcttatcgtcggatttatttagaactaagaaatcgtggttatctggtaaatcataaaagagttcaaggcttgatgaaagtactcaatttacaagctaaaacgcgacagaaacgaaaatattcttctcataaaggagacgttggcaagaaggcagagaatctcattcaaggccaatttgaaggctctaaaacaatggaacagtgctacacagatgtgacagaatttgccattccagtaagtacttaaaagctttacttatcaccagttttagatggctttaatagcgaaattatcgcctataatctttcaacttcacccaacttagaacaagtacaaacaatgttggaacaggcattcacagagaagcactacgagaatacgattctccatagtgaccaaggctggcaataccaacacgattcttatcatcggttcctagagagtaagggaattcaagcatccatgtcacgtaagggcaacagccaagacaacggtaggatggaatctttctttggcattttaaaatccgaaatgttttatggctatgagaaaacatttaaatcacttaatcaattggaacaagccattatagactatattgattactacaacaacaaacgaattaaggtaaaactaaaaggacttagtcctgtgcagtacagaactaaatcctttggataaattatttgtctaactgtttgggggcagtacagaactggcattttattttttaggatcttgatgggttaggttcaatccccaagggaccaaattttcagttttatttttgatacgagctatattgtccttatgacgaatgataatcaaactagcaagtgctaagataatagcgatgaagagagagtcatagttactcaggataaaaccaaaaagtggaaagagcagaaccccgataacagccgcaatcgatgctgtgacactagacagtgaaatcatactgccaagatagagagctccaaagaagataatcgcaaggtagagacagaagataggcgcaaatccgaaaatcactccagcactggttgcgacagccttaccacctttaaatcctgcaaagatagggaaggtatggccgataacagccaaaagtccaaagatgagaggagaaacgccttgtagatgaaaaataatcggaagcagcgttgctagggttcctttgaaaaagtcaatcacaaaggttgccataccagctttcttacctaaaatgcggaaggtgttggtcgttccagtgttaccagaaccatgctcgcgtagattgatttgaaagaatacttgtccaatccagagaccagatggaatcgaacccagcagataggctaggattaataaaactattgtaatcatactcctattatatcatgaattgggaaagaaaagcagagaatctctgctgaaattgtcacatcggagaaagaaaaattttgcaaaatccttggaaaacctgtagaatagtaaagatgaacgaataggaggttccttgtgtcaaaaaaggaaatcaatattaacaattataatgatgatgctattcaggtgctagaagggttggatgcggtccgaaaacgtccagggatgtatattggatcgaccgatggcgctggtcttcatcacctagtttgggaaatcgttgataatgcagtcgatgaagccttgtctgggtttggtgatcgtattgatgtaactatcaataaagacggtagtctaacggttcaagaccatggacgtgggatgccgacaggtatgcacgctatgggaattccaactgttgaggttatctttaccattcttcatgccggagggaaattcggtcaaggtggctataagacatcaggtggacttcacggagtgggttcttccgttgttaacgccctttctagctggttagaagttgaaattacccgtgatggcgcagtttacaagcaacgtttcgaaaatggtggaaaacctgtcacgactttgaagaaaatcggtacagcacccaagtctaaaacaggcaccaaagttacttttatgcctgacgcgactatattttctacgacagatttcaagtacaataccatttcagagcgccttaatgaatcagcctttctcttgaaaaatgtgaccttgtctttaacggacaagcgaacaaatgaagcgattgagttccactatgagaatggagtacaagattttgtttcttatctcaacgaagataaggaaatcttgacgccagttctttactttgaaggggaagacaatggttttcaagtggaagtagccctccagtacaatgacggattctcagataacattctatcttttgtcaataacgttcgcaccaaggacggtggaacgcacgagacaggactcaagtctgccattaccaaggtcatgaatgactatgcacgtaaaacaggtcttctcaaggaaaaagataaaaaccttgaaggttcagactatcgtgagggactagcggccgttctttctatcttagttcctgaagaacacttgcagtttgaaggacagaccaaggataaactaggaagccccctagctcgcccagttgtggatggaatagtggctgataagttgacctttttccttatggaaaatggggaattagcttctaacctcatccgcaaggctatcaaggcccgtgatgctcgtgaagcagcacgtaaggcgcgtgatgagagccgaaatgggaagaaaaacaagaaagataagggcttgttgtctgggaaattgaccccagcccaatctaagaatcctgctaagaatgaactctatctagttgagggggactctgccggtggttctgccaaacaaggtcgtgaccgcaagttccaggctattctacctcttcgtggtaaggttgtcaatacagccaaggccaagatggcggatatcctcaaaaatgaagagatcaataccatgatttataccattggtgcgggtgttggagcagacttctctattgaagatgccaactatgataagatcattatcatgaccgatgcggataccgacggtgcccatatccagaccttgctcttgacatttttctaccgttacatgcgtccgctagtcgaggcaggtcatgtctatattgccctcccacctctttacaagatgtccaaaggtaaaggcaagaaagaagaagtggcctacgcttggacggacggagaactagaagaactccgtaaacagttcggtaaaggcgctaccctccaacgatacaaaggacttggtgagatgaatgcggaccagctctgggaaacaaccatgaacccagaaacacgtaccctcatccgtgtcacaattgaagatttagcgcgcgccgaacgccgcgtcaatgttctcatgggagataaggtagaaccacgccgtaaatggattgaagataatgtcaagtttacgctagaagaaacgacagtgttttaatgaaagaaaataatatgttagtaaactggaaattagagtcggatgtgaatgactatgtgaaaaagcagtttgaaaatcttggtttgaaaaaattgcaggattattaatgaagaatctgctatgagtgcttatctcaaagaggcgcttaagggagcggctaagacacaaactaagactaattttggaaaaccagattttcatattgaaaaatacaaacaggatagtttggttacttatcgtaactgaacacgggaggaattcccgtaaaatatcttttactgcataaaaacctactctacattctttgaaaggagttgaacacgccctagatactgtgtgaaaaagataaattctcttgtgagtttgcttacttcaagaattttctattttcacttggtattttatgggctttgtatcttatgtctaacattcaaaacatgtccctggaggacatcatgggagagcgctttggtcgctactccaagtacattattcaagaccgggctttgccagatattcgtgatgggttgaagccggttcagcgccgtattctttattctatgaataaggatagcaatacttttgacaagagctaccgtaagtcggccaagtcagtcgggaacatcatggggaatttccacccacacggggattcttctatctatgatgccatggttcgtatgtcacagaactggaaaaatcgtgagattctagttgaaatgcacggtaataacggttctatggacggagatcctcctgcggctatgcgttatactgaggcacgtttgtctgaaattgcaggctaccttcttcaggatatcgagaaaaagacagttccttttgcatggaactttgacgatacggagaaagaaccaacggtcttgccagcagcctttccaaacctcttggtcaatggttcgactgggatttcggctggttatgccacagacattcctccccataatttagctgaggtcatagatgctgcagtttacatgattgaccacccaactgcaaagattgataaactcatggaattcttgcctggaccagacttccctacaggggctattattcagggtcgtgatgaaatcaagaaagcttatgagactgggaaagggcgcgtggttgttcgttccaagactgaaattgaaaagctaaaaggtggtaaggaacaaatcgttattattgagattccttatgaaatcaataaggccaatctagtcaagaaaatcgatgatgttcgtgttaataacaaggtagctgggattgctgaggttcgtgatgagtctgaccgtgatggtcttcgtatcgctatcgaacttaagaaagacgctaatactgagcttgttctcaactacttatttaagtacaccgacctacaaatcaactacaactttaatatggtggcgattgacaatttcacacctcgtcaggttgggattgttccaatcctgtctagctatatcgctcaccgtcgagaagtgattttggcgcgttcacgctttgacaaagaaaaggctgagaaacgtctccatatcgtcgaaggtttgattcgtgtgatttcgattttggatgaagtcattgctcttatccgtgcttctgagaataaggcggacgccaaggaaaacctcaaagttagctatgattttacggaagaacaggctgaggctatcgtaactttgcaactgtaccgtttgaccaataccgatgtggttgtcttgcaggaagaagaagcagagcttcgtgagaagattgctatgctggcggctattatcggtgatgaaaggactatgtacaatctcatgaagaaagaacttcgtgaggtcaagaagaaatttgcaactcctcgtttgagttctttagaagacactgcgaaagcaattgagattgatacagctagtcttatcgctgaggaagatacctacgtcagcgtgaccaaggcaggttacatcaagcgtaccagtccacgttcctttgcggcttccaccttggaagaaattggcaagcgtgatgatgaccgtttgatttttgttcaatctgccaagacaacccagcacctcttgatgttcacaagtcttggaaatgtcatctacagaccaatccatgagttggcagatattcgttggaaggacatcggagagcatctgagccaaaccatcacaaactttgaaacgaatgaagaaatcctttatgtggaagtactggatcagtttgacgatgcgacaacctactttgcagtgactcgccttggtcaaatcaaacgggtagagcgaaaagaattcactccatggcggacctatagatctaagtctgtcaagtatgctaagctcaaagacgatacagatcagattgtagcagtggctccgattaaactagatgatgttgtcttggttagtcaaaatggttatgccctgcgtttcaatatcgaagaggttccggttgtcggtgctaaggcagcaggtgtcaaggctatgaatttgaaagaagatgatgtcctccaatctggctttatctgtaatacttcgtccttctacctcttgacccagcgtggaagcttgaaacgtgtttccattgaggaaattctagcaaccagccgtgccaaacgaggattacaagtcttgcgtgagttgaaaaacaaaccgcatcgtgtcttcttggcaggagcagttgcagagcaaggatttgttggcgatttcttcagtacggaagtggatgtgaacgaccaaactctgcttgtccaatccaataaaggaacaatctatgaaagccgattgcaagacttgaacttgtcagaacgcactagcaatggaagcttcatttctgacacgatttcagatgaagaagtttttgacgcttatcttcaggaagtagttactgaagataaataagtgaaatgaagaatcagttctaagagttggtttttattggagaaattttctgaaaattacaaaatatacttgctattttagaaaaatagtgtagaatataagaaataggtttttagaataaggagtggaatatgacagtaacgattgattgggaaaacctcggtttttcctatatgaaattaccttatcgctatcttgctcatttcaaaaatggacaatgggatcaaggagagcttacagaggatgcaactttgcatatttcagagtcttctccaagtcttcactatggacaacaagcatttgaaggtttgaaagcttatcgtactaaggatggcagtgttcaactgttccgtcctgatgaaaatgctaaacgtctgcaacgtacatgtgaccgtctcttgatgccacaagttccgacagacatgtttgtagaagcttgtaaagcagttgtccgtgcgaatgaagaatacgtaccaccatacggaacaggtggaaccttatatcttcgccctcttttgattggtgtcggagatattatcggggtaaaaccggcagaagagtacattttcaccatctttgctatgccagttggaaattactttaaaggtggtttggtcccaaccaacttcttgattcaggatgagtacgaccgtgcagcaccaaatggtacaggtgcggctaaggttggtggaaactatgctgcaagtctcttaccaggaaaaatggccaagtcacgtcatttctcagatgttatctatctggacccatcaactcatacaaagattgaagaagtcggatcagctaacttctttggaattacagctgataatgaatttgtaacaccattgagtccatctatcttgccatctattaccaagtattccttgctttatttggcagaacatcgcttgggattaactcctattgagggtgatgttccaattgataatcttgaccgttttgtagaggcaggtgcctgtggtacagcagcggttatttctccaattggaggtattcaacatggtgatgatttccatgtattctatagtgaaacagaagtaggtcctgtgacgcgtaaattatataatgaattgacgggtattcagtttggcgatattgaagcgccagaaggttggattgtaaaagtagattaaaataaaccaaaggagattctttatgaaatagaaaaagtggctcttaacagcaggagtggtcctgagcacgtcagctattttagtggcttgtggaaaaactgataaagaagcagatgcaccgacaacattttcttatgtctatgcagtagatccagcatcattgggctacagtatagcgactcgaacatcgaggacagacgttattggaaatgttattgatggtttgatggaaaatgataaatacggcaatgttgctccttctcaaaaagactatgatttgaacagtacaggatgggctccaagctatcaagatccagcgtctcacttgaatattatagatccaaaatctggttctgccatgaaacaccttggtattacgaaaggaaaagataaggatgttgtagctaaacctggtttggataaatataagaaattgttagaagatgctgtttctgagaccactgacctagagaaaagatatgaaaaatatgccaaagctcaagcttggtcgacagatagttcattattgatgccaacagcttcatctggtggttctccagttgtaagtaacgtagtaccattctcaaaaccatactcacaagttggtattaagggggatccatatatctttaaaggaatgaaattgcaaaaagatattgttacaacaaaagaatataacgaggtttttaaaaaatggcaaaaagaaaaattggaatccaatagcaaataccaaaaagaactagaaaaacacattaaataaggaatggtattgatcttgataaaattttaaaaatactgtcattttgaatataaaggagtttgatatggagtggattagattaataggaatagcaatcattgttgtgggttttattttaaaatttgatacaattgcaacagtagtcttagctggtttggttacagctttagtttcaggtgtttctctcgttgaatttttggagattttgggaaaagaatttagcaatcagcgagtgctcacgatttttatggttaccttgcctcttgtggggctgtcagaaacctttggactcaagcaacgatcaatcgatttgattcgaaagattaaaggtctgacagttggaaacttctatacagtttatttctttattcgagagttagctggtttcttttcaattcgtctaggaggacaccctcagtttgtcagacctttggttcaacctatgggagaagcagctgcagagtctcaattaggtagaaagttaacagaggttgaagatgagacaataaaagcgcgtgcggctgcgaatgaaaattttggaaatttctttgctcaaaatacgtttgtaggtgctgggggagtcctcttgatagggggaacattagatcagttaggctatgaaagcaattatgcagggattgcttctacatctattattgttgctgttataacacttattgtagtggggatttataattatttatttgataaaaaattgatatcaaaaaagactaggggaggagaacaaaaatgacagagttggcaaagcaactattagagttgacctatattgtgattggttgtcaatttctccatacagcctattgtagttataaagataaaacaaacccagttcgacttgggacatctgcattttggactctattgtctattacgtttataggtggttcctatatgccaaatatgagtattggtattattgtaatcctattatcgctgttaacattgtttaagcaagtccgtatcggaaccttgccatccttagatgaaatgaaagccaatattgaatctaacaggttgaaaaataaaatttttattccagttatgctgatggcaatacttgcgttggtcttagcgcaaatgattccagaatttagcaagatttcgattagccttgccgccttgtttgctacaatttctgttcttgtgattaccaatagtcaccctaagagtctgttatcagaaaataatcgaatgactcagcaagtttcaacaagtgggattgttcctcaattattaggggctttgggggctatttttactgtagcaggtgttggtgatgttatctctcatctgattagcggtattgttccttcagatagtcgctttataggagttttggcctatgttcttggaatggttctattcacaatgattatgggaaatgcttttgcagcattcaccgttattacagcaggtgttggagttccctttgtatttgctctgggagctaatccaattgtggctggtgctcttgccatgacagcaggttattgtgggaccttattgaccccaatggctgctaattttaacgctctaccagcagcattgatggatatgaaagatcagaatggcgttataaaggctcaagcaggtgttgctctagtaatgattgttattcacatattcttaatgtactttctcgcattttagtaaaggaaaataaaatgaaaatattggttacaggttttaatccttttggaggtgaaaagattaatccagctttggaggctgtaaaattattaccatctgagattaatggggctgaagttcgctgggtagaaattccaacggttttttataagtcgtcagaagttttagaggcagaaatattacgatatcaaccagatgctgtactttgtattggacaagcaggcggcaggaccggcttaacacctgaacgagtggctattaatcaagatgatgctcgcatacctgataacgaaggcaatcaaccaattgatacaccgattcgtattgatggagcatcggcctattttagtagtttacctatcaaagcgatggtacaagctatcaaaaaacagggacttccggcagttgtatccaatagtgcaggaacctttgtttgcaatcatttgatgtaccaagctctttatttagtggataaaaaattccctaatatgagagcaggtttcatgcatattccatatatgatggaacaagtagtaaataagccgaatactgcaggaatgagtctatgtgatattgtaagaggcatagaggtagctattgaagctattgtagactacaaagataaggatttgcagttagtaggcggtgagactcactgataacctaaaaaggatagtcaattatgcttgtttactaactattaactatgctaaatcaattgaggttgtttacataaaactctatatcagagaagcctgatatagagttttttcttgctagttttaggatttttttgtaaaatagaaaaagtgaagagaggtatgaaatgagcaagaaagataaaaaaatcgaaattcaagtagcggatgccaaagttaatgttggtaaagacagttttgaaggttatacattgactatcggtaaaaaagttatcggagaaattgccgaattagacggacaatttgccattataaagaatgggaatgtcgatagtttttataaaaaattggaaaaagctgtggaaattttgattgaaaattataatttagcaaaataagtcttgtttttttgaaattttcatgatataatagtccatgttgattgtaggagagatagcgaagaggctaaacgcggcggactgtaaatccgctccttcgggttcgggggttcgaatccctctctctccatttcattaatggggtatagccaagcggtaaggcaagggactttgactccctcatgcgttggttcgaatccagctaccccagttcttaggtaataatcaagatagaaagcaaaatatcttagggtattttatttttataattgaaagacgtgaatgatatgaacatgtccttgcgggtgcttaggaaaaaaattataagtatgtcaagtttaagaaaaacttgattgttggaggattttttagatgaacgaatttgaagatttgctaaatagcgttagtcaagttgagactggtgatgttgttagtgctgaagtattgacagttgatgcgactcaagctaacgttgcaatctctggaactggtgttgaaggtgtcttgactcttcgcgaattgacaaacgatcgtgatgcagatatcaatgactttgttaaagtaggagaagtattggatgttcttgtacttcgtcaagtagttggtaaagatactgatacagttacataccttgtatctaaaaaacgccttgaagctcgcaaagcatgggacaaacttgttggtcgcgaagaagaagttgttactgttaaaggaacgcgtgccgttaaaggtggactttcagtagaatttgaaggtgttcgtggatttatcccagcttcaatgttggatactcgtttcgtacgtaacgctgagcgttttgtaggtcaagaatttgatactaaaatcaaagaagttaacgctaaagaaaaccgcttcatcctttcacgtcgtgaagttgttgaagcagctactgcagcagctcgcgctgaagtattcggtaaattggctgttggtgatgttgtaactggtaaagttgctcgtatcacaagcttcggcgctttcgtcgaccttggtggtgttgacggattggttcacttgactgaattgtcacatgaacgtaatgtatcaccaaaatcagttgtaactgttggtgaagaaattgaagtgaaaatccttgatcttaacgaagaagaaggacgtgtatcactttcacttaaagcaacagtaccaggaccatgggatggcgttgagcaaaaattggctaaaggtgatgtagtagaaggaacagttaaacgtttgactgacttcggtgcatttgttgaagtattgccaggtatcgatggacttgttcacgtatcacaaatttcacacaaacggattgaaaatccaaaagaagctcttaaagttggtcaagaagttcaagttaaagttcttgaagttaacgcagatgcagaacgcgtgtcactttctattaaagctcttgaagaacgtccagcccaagaagaaggacaaaaagaagaaaaacgtgctgctcgtccacgtcgtccaagacgtcaagaaaagcgtgatttcgaacttccagaaacacaaacaggattttcaatggctgatttgtttggtgatatcgaactttaatcaaattgaaaattcacaaaatcctttgtttactaaacaagggatttttctggctctttgtcaactgtagtgggttgaagaaaagctaagctcgagaaaggacaaattttgtcctttcttttttgatattcagagcgataaaaatccgttttttgaagttttcaaagttccgaaaaccaaaggcattgcgcttgataagtttgatgagattattggtcgcttccagtttggcgttagaatagtgtagttgaagggtgttgacaagcttttctttatctttgaggaaggttttaaagacagtctgaaaaataggatgaacctgcttaagattgtcctcaataagtccgaaaaatttctccggttccttattctgaaagtgaaacagcaagagttgatagagctgatagtggtgtttcaagtcttccgaataactcaaaagcttgtttaaaatctctttattggttaagtgcatacgaaaagtaggacgataaaatcgcttatcactcagtttacgactatcctgttgtatgagcttccagtagcgcttgatagccttgtattcatgagactttcgatgaaactgattcatgatttggacatgcacacgactcatagcacggctaagatgttgtacaatatgaaagcgatcaagaacgattttagcattcgggagtgaaacagtctgggagactgtttcagcctgagcctagaaatttgaaagcgaagttgtctagctaagtcatagtaagggctaaacatatccatagtaatgattttgacgcgacatcggacggctctatcatatttaagaaagtgatctcggatgatagcttgtgttctaccttcaagaacagtgatgatatcgagcttgtcaaaatcttgcgcaataaagctcatcttcatctcccgattgaaacagtcactccccggactgtttcaacgtcccaggacataatctcaggaagacgcgaaaaatcatgctcaaagtgagaatcattgagctttcgaatgacagttgaagttgaaatggccagctgatgagcaatatcggtcatagaaatcttctcaatcaacttttgcgcaattttttggttgataatacgaggaatttggtgatttttcttgacgatagaagtttcagcgaccatcatttttgaacagtgatagcacttgaaacgacgctttctaagtagaattctagtaggcataccagttgtctcaaggtaaggaatcttagacggtttttgaaagtcatatttcttcaattggtttccgcactcagggcaagatggggcgtcgtagtccagtttggcgatgatttccttgtgtgtatctttattgatgatgtctaaaatctggatattagggtctttaatgtctagtaattttgtgataaaatgtaattgttccatatgaatctttctaatgagttgtttggtcgcttttcattataggtcatatgggactttttttctacaataaaataggctccataatatctataagggatttacccactacaaatattatagagccaaaaatcctttgtttactaaacaagggatttttcttttgtctctgctccttttttgatataatagttctatgttaaaatcagaaaaacaatcacgttatcaaatgttaaatgaagaattgtccttcctattggaaggcgaaaccaatgttttggctaatctttccaacgccagtgctctcataaaatcacgttttcctaataccgtatttgcaggcttttatttgttcgatggaaaggaattggttttaggccccttccaaggaggtgtttcctgcatccgtattgcactaggcaagggtgtttgtggtgaggcagctcactttcaggaaactgttattgttggagatgtgacgacctatctcaactatatttcttgtgatagtctagctaaaagtgaaattgtggtgccgatgatgaagaatggtcagttacttggagttctggatctggattcttcagagattgaggattacgatgctatggatcgagattatttggaacaatttgtcgctattttgcttgaaaagacagcatgggactttacgatgtttgaggaaaaatcttaatgtatcaagcactttatcgaaaatatagaagtcaaaacttctcccagttagttggtcaagaagttgtggctaagactcttaaacaagcggtggagcaagagaaaataagtcacgcttatcttttttctggtcctcgtggaacgggaaaaaccagtgttgctaaaatctttgccaaggctatgaactgtcccaatcaagtgggtggcgaaccttgcaataactgctatatttgtcaagcagtgacggacggtagtttagaagatgtcattgaaatggatgcagcttctaataatggggtagatgaaattcgcgaaattcgtgataaatctacctatgcgcctagccttgctcgttataaggtttatatcatagatgaggttcacatgctgtctacaggggcttttaatgccctcctaaagacgctggaagaaccaacacagaatgtagtctttattttggccactactgaattgcacaagattcctgctactattctatcccgtgtgcaacgttttgagtttaaatcaattaagacacaggatattaaggaacatattcactatatcttagaaaaagaaaatatcagttctgaaccagaggctgtggaaatcattgccagacgggcggaaggtggaatgcgggacgccttgtctattttggatcaagccctgagtttgacacagggaaatgagctgacgactgctatctctgaagaaattactggcaccattagcctatcagccttggatgattatgtggcggccttgtctcaacaggatgttcccaaagctttgtcttgcttgaatcttctttttgacaatggtaagagcatgactcgttttgtgaccgatcttttgcactatttaagagacttgttaattgttcaaacagggggagcaaatactcatcatagttcagtctttgtagaaaatttggcacttcctcaaaaaaatctgtttgaaatgattcgcttagcaacagtgagtttagcagatattaagtctagtttgcaacccaagatttatgctgaaatgatgaccgtccgtttggcggaaatcaagtccgaaccagctctatcaggagcggttgaaaatgaaattgctacgctgagacaggaagttgcccgtctcaaacaagagctttctaatgtaggtgcggttcctaaacaagttgcaccagctcctagtcgaccagctacgggcaaaacagtctatcgtgtcgatcgcaataaagtgcaatctatcttacaagaggccgtcgaaaatcctgatttagcacgtcaaaatttaattcgtttgcagaatgcctggggagaggtaattgaaagtctaggtgggccggacaaggctctgctagttggttctcaaccggttgctgccaatgaacaccatgctattcttgcttttgagtctaacttcaatgctggtcaaactatgaaacgagacaatctcaataccatgtttggtaatatcctcagtcaggcggcaggtttttcacctgagattttagctatttccatggaggaatggaaagaagttcgcgcagccttttcagccaaagccaaatcttctcaaactgaaaaagaagtagaagaaagcctgattccagaaggatttgaatttttggctgataaagtgaaggtagaggaagactaaagaaagatttcatgatacaataagtttatgaataaacaacaatttattattatggcgctgtttacagctgctgagacctattttttcaatgaagcctggatgactggccgctatattatggcagccttttgggcaattttactctttagaaatttccgagtcagttatgtgatgggcaaaatcgttgatgtcatcgatcagcattttaataggaaagactagccctcagcttccagacaaaatcaaagccttttaggcttttttttgttatactagaaaagtatatttatagaatttttgctctatttctggggaaatcagacgtttttctagtaagtactgtaaaagttttgaaaaagaaaggaactatcatgtcagtattagagatcaaagatcttcacgttgagattgaaggaaaagaaattttaaaaggggttaacctgaccctgaaaacaggagaaattgccgctatcatgggaccaaatggtacaggtaaatcgactctttctgccgctatcatgggaaatccaaactatgaagtaactaaaggtgaagttttgtttgatggcgtaaacatccttgagttggaagtggatgagcgtgcgcgtatgggacttttccttgctatgcaatacccatcagaaatccctggaattaccaatgctgagtttcttcgtgccgctatgaatgcgggtaaagaagatgatgagaagatttcagttcgtgagtttattactaagctagatgaaaaaatggaattgctcaacatgaaagaagaaatggcagagcgttacctcaacgaaggcttctctggtggtgagaaaaaacgcaatgaaattcttcaacttttgatgttggagccaacatttgctcttttggacgagattgactcaggtcttgatattgacgctcttaaagttgtgtctaaaggtgtcaatgccatgcgtggtgaaggttttggtgctatgatcatcactcactaccaacgtcttttgaactatatcacacctgatgtggtacacgtgatgatggaaggtcgtgttgtcctttctggtggtccagaattggctgcgcgtttggaacgtgaaggatacgcaaaattagctgaagaacttggctacgactacaaggaagaattgtaattccctcgtatcttttaggagaagtaaatgactagagaaaatattaaacttttttcagaaatgcacgctgaaccaagctggttggctgatctccgtcaaaaagcttttgacaagattgagactttggaattaccagttattgagtgtgtcaaattccaccgttggaatctgggtgatggaacgattacagaaaatgagccatcagcaaatgttccagatttcacagctttagatcatcacttgaagttggtgcaagtaggaactcaaactgttttcgaacaaactccagttgagttagctgaacagggtgttgtcttcacagactttcactcagctttagaagaaattccagagctgatcgaagaattcttcatgtcatctgttaagtatgatgatgacaagttggcggcttaccacacagcttactttaacagtggtgctgtactctatattccagataacgtagaaatcacagagccaattgaaggaattttctaccaagatagcgatagcaatgtgccgtttaacaagcatattatgattatcgttggtaaaaattctaagattagttatctggagcgtttagagtcacgcggtgaaggaagtgacaaagcaactgccaatatcacagtggaagtgattgcacgttctggtgcgcaagtcaagtttgctgctatcgaccgtctaggtgaaaacgtcactgcctacattagccgtcgtggtaaattaggcaacgatgcaagtattgactgggctatcggtgtcatgaacgaaggaaatgtcgttgctgattttgatagtgacttgattggtaatggtagccatgctgacctcaaggttgtagctctttcaagtggtcgtcaggtacaagggattgatactcgtgtaactaactatggctgcaactcaatcggaaacattctacaacatggggttatccttgaaaaagcaactttgactttcaatggtatcggccacatcatcaagggtgctaagggagcagatgcgcaacaagagagccgtgttctcatgctttcagaccaagcgcgttcagatgctaacccaattcttttgattgatgaaaatgacgtaactgcaggccatgcagcctctattggtcaggtagatccagaagatatgtactacctcatgagtcgtggcttggataaggcaactgcagagcgtttggttgttcgtggtttccttggatctgttatcgtggagattccagtcaaggaagttcgtgatgaaatgattgcaactatcgaagagaaattgtcaaaacgctaaggggcagcctatgttagatgtagaagcgattcgcaaggattttccaattttagatcagattgtcaatgatgaacctctggtctatctggacaatgctgcgacgacacaaaaaccactagtagttctgaaagctattaacagctactatgagcaggacaatgccaatgttcaccgtggtgtccataccttagcggaacgagcgacagcttcttatgaagctgctcgtgaaaccattcgtaagtttattaatgcaggctctacaaaggaagttctctttaccagaggaacgacaaccagccttaactgggtggcacgctttgctgaggaaattctcactgagggagaccaggtcttgatttcagtaatggaacaccattctaatatcattccatggcaggaagcttgtcgaaagactggagcagagcttgtctatgtctatcttaaagacggtgccttggatatggaggatttgcgagctaaattgactgataaggttaaatttgtttccctagctcatgcctccaatgttcttggtgtggtcaatccgatcaaggaaatcactcaattagcccaccaagttggggcaattatggtagtggatggtgctcaatctacacctcatatgaagattgatgtccaggacttggatctggactttttcgccttttcgggtcacaagatggctggtccgactggtatcggtgtcctttacggcaaagaaaagtatcttgagcaaatgtctccagtagaatttggcggcgagatgattgattttgtctacgagcaatttgctagttggaaggaattgccttggaaatttgaggctggaacgccaaatatggcaggagctattggacttgcgactgcagttgattatctggaaaagattggtatggatgccgttgaagctcatgaacaggaattgattgcgtacgtctatccaaaactgcaggcaattgagggattgaccatttacggttctcaggatttggctcaacgttcgggtgttattgcctttaacctaggtgatctccatcctcacgatcttgcgacggctctggattatgaaggagtggctgttcgtgctggtcaccattgtgcgcaacccttgcttcagtatttggaagtcccagcaacagctcgtgcaagtttttatatctacaataccaaggcagattgcgacaaactagtcgatgccctacaaaagacaaaggagtttttcaatggcactttctaaactagatagcctttatatggcagtggtagcagaccattcgaaaaatccacatcaccaagggaagttagaagatgctgagcaaatcagtctcaacaatccgacttgtggggatgtcatcaacctctctgtcaagtttgatgcagaggaccgtttggaagatattgcttttctaaattcaggatgcacgatttcaactgcttctgctagtatgatgacagatgccgttttaggaaaaaccaaacaagaaattttagaactggcgactattttttctgaaatggttcaagggcaaaaagatgagcgtcaagaccaacttggagacgcggcattcttgtcaggtgttgccaaattccctcaaagaatcaagtgtgcaaccctagcttggaatgcccttaagaaaacaattgaaaatcaagaaaaacagtaagacaagtttcttttgtcttatgaattattagaaatgaagaaagaaaggatactatggctgaagaaagagtagaaccaaaaccaattgaccttggtgaatataaatttggtttccatgacgatgtagagcctgtcttatcgacaggaaaaggactcaacgaaggtgttattcgtgaattatctgctgctaagggtgagcctgagtggatgttggagttccgtttgaagtcttatgaaaccttcaaaaaaatgcccatgcaaacttggggagcagacttgtcagagattgactttgatgacttaatctactaccaaaaaccatctgacaaaccagcccgttcttgggatgatgtacctgaaaagattaaagaaacctttgaacgtatcgggattccagaagctgaacgtgcttatttagcaggggcttctgcccagtacgagtcagaagtggtttaccacaacatgaaggaagagttccaaaaattaggtattatctttacagatacagattccgcactcaaggaatacccagacttatttaaacaatactttgcgaagttggtaccgccgacagataacaagttggcagccctcaactcagcagtatggtcgggtggaacttttatctacgtgccaaaaggtgtcaaggtagatattccacttcaaacttatttccgtatcaataacgaaaatataggtcagttcgaacgtaccttgattatcgttgatgagggagcaagcgtctactacgtagaaggatgtacagcaccaacatattcaagcaatagcttacacgctgccattgtagaaatttttgctttggacggagcttatatgcgttatacaactatccaaaactggtctgataacgtctataacttggtaacaaagcgtgctaaggctcaaaaggatgccactgttgagtggattgatggaaacttgggtgccaaaacgactatgaaatatccatctgtttaccttgatggagaaggagcgcgtggtaccatgctctctatcgcctttgctaatgcagggcaacaccaagacacgggtgctaagatgattcacaatgctccacataccagctcgtctattgtgtctaaatccatcgctaaaggtggaggaaaggttgactaccgtggacaagtcacctttaacaagaactctaagaaatctgtttcccacattgaatgtgataccattatcatggatgacttgtcagcatcagatactattccatttaatgaaattcacaactcgcaagtggctttggaacacgaagccaaagtatctaagatttcagaagagcaattgtattatctcatgagccgtggattgtcagaatctgaggcaactgaaatgattgtcatgggatttgtagaaccctttacaaaagaacttccaatggaatacgcagttgagctgaaccgcttgattagctatgaaatggagggatcagttggataaaatttgattttatactcttcgaaaatctcttcaaaccacgtcagcatcgccttaccgtatgtatggttactgacttcgtcagtttcatctacaacctcaaaacagtgttttgagcaacctgcggctagcttcctagtttgttctttgattttgagtattagatttactcaaaatcaaggattttgaagatgaacttgtatcaaaaaatcgcggtttaaaatcgcgattttttataatttctcgttaacaaagcggacaaactgattccaccaaacttttaagaagaaggctttttcaattttcttgtctgctaccatttcgaaactagggcgctctgtggtgatgtaaccttgaccaatcaagtccttgtcttcataagtcaaatggccaaccactgttccagcttcaagtggtgctgggattgctttggaatcaggtgtgaattgaacagattgggaagattgattcccaacacgttcgattagatagatatcctctggagccactgcagttactgtatcttcttttccatcttgtacaggggctttgctatcttgataggcatcgccttgttgaacgattttgcgaagtgtaaatgtagaagaaatataatccattagggaagatgtagctgtaaatcgagcgtaaggattattgtcttgatgatctgcatttaaaacaactgtgatgactctcatgcctttttcgacagtagtaccaacaaaagactctccagccttatctgttgttcctgtttttagcccatcaaaaccaccacggtaagcaggcataccttctaacatgtagttggttgaagtgattgtcatcccagcaaaagtagaagaaggttttttggtgatttctaagacttgtgggtattttttgatgaggttgcgagcaacgatagcgacatcataagcactaagcttattttcctcatcttttttagaacctgggtaaatgttatcccctagagtttcattgttaagacctgtcgtattgacaacagtggcatcctgaattccccattccaagagttttgcccgcatcatatcgacgaaatctttttctgagccagcaattttctcagctagggcaatagcggcgctgttggcactagataccagagttgcttcaagcaactcttcgacagtataattacgggcctccataggaatattactggcttcagaatttgtcgtcaattgataaggataatcagaaatatctacaggagtggagagggtaatacttccgttttccaaagcttcatagaccagataaacagtaatcaattttgttatggaagcaatttcgacaggttgcgttgcatccttctcatagagaattttaccagtatttgcctcaacagcaatcgcatgtttagcggcaatggtaaaatcttgagcaacagcagtagaagcaccccctaaaagagagacagttaacaaagttaaaaatatttttttcatagtagtcttattctatcataaagaaaaaaaatattcttgctttaataattcatctgttaagctttttgaaaatatggtaaaataaagtaagggaggtaactcatgtttcgtagaaataaattatttttttggaccacagaaattttactcttaaccatcatcttttacctatggagacagatggggtctttgattaacccttttgttagcgtgcttaatacaattatgattccatttttattagggggctttttttattatttgacaaaccctattgttactttcttaaataaagtctgtaaactcaatcgtttgcttggtattttaattaccttgtgtactttggtctggggaatggtcataggtgttgtctatctcttacctattttgattaatcagttatctagtttgattatatctagtcaaactatttatagtcgagtacaagacttaatcatagacttatctaattatcctgcgctccagaatttggatgtagaagctacaattcagcagttaaacttatcctatgttgatattcttcaaaatatcctaaatagcgtatcaaatagtgtggggagcgtcttgtcagctcttatcagtactgttttgattttgattatgactccagtttttttggtttatttcttattagatggacataaattcttgcccatgcttgaaagaacgattctaaagagggatcgcttgcatattgcaggcttattaaagaatttaaatgcgacgattgctcgctatattagtggagtttcgattgacgcaatcattataggttgtttggcttatattggctatagtattattggtttaaaatatgctttagtttttgccattttttctggtgtagccaatttaattccttatgtggggccaagtattggtttgattcctatgatcatcgcaaatatattcactgatccccatagactgctgattgcagtgatttatatgcttgttgttcagcaggtagatggcaatatcttatatcctcgaatcgtaggaagtgttatgaaggttcatccaatcacgattttagttttacttttgttgtcaagcaatatctatggtgtagttggaatgattgtcgcagtgccaacctattctatcttgaaagaaatttctaagttcttatcccatttgtatgaaaatcataaaataatgaaagaacgagaaagagaattagctaagtaaaagtcaggagaaccctgatttttctttactggaagtggcctttagattagaagactgaaaataagttaaagtcttaaactaattttcacagctaagaatagtagaagttaatctgataaaaatcgaaaaaaccagtggaattctgtgtcagggtaagttccactggttttcatagtctattaaagttcgaatgaaacctatttatagtagattgaaactagaatagtacacctctaattctaaaacattgttagaaatcgatttgactgtcctgatctattcgttctattcttatttcattttactatattttggtgcaataagtgaaaagtagtccgaataatataaggattgattttatagtttttaaactcaaatgaattgaaataaagagagtacgaaaattctcatctgaaagtattttagaataattctcttcgtgaatttcttcaaaacagatagcttcatcttaggtatgtgatttctttttgcatttttgagttagataaggtataatgattttattgtcttttggggtcgttacggattcgacaggcattatgaggcatattttgcgactcgtgtggcgacgtaaacgctcagttaaatataactgcaaaaaataacacttcttacgctctagctgcctaaaaaccagcaggcgtgacccgatttggattgctcgtgttcaatgacaggtcttattattagcgagatacgattaagccttgtctagcggtttgataagagattgatagactcgcagtttctagacttgagttatgtgtcgaggggctgttaaaataatacataacctatggttgtagacaaatatgttggcaggtgtttggacgtgggttcgactcccaccggctccattattcctttgcattcttttgcattccttggtaaaacgttgttaaatcaacgttttttatttttatctttggtattcctttgcattcttttgctaaaaagggagtcacaaacagaccctattttaaaaaaggatagaaaaaaggatacaacatttgtcgcatcctaaaaataatcttttttcgacggaagacatgggattcgaacccacgcacgctattacacgcctaccgcgtttccaacacggcctcttaagcctcttgagtaatcttccaatacttactcaaatagtctaccataaaggctcttatcttgcaataaaaattctagaaataagaaaaatgatagattttgaaagaaaatgataaaaaatgcttgacttcgaaagaaagtatgatagaatgaatagtgtaaacgataacaggaggtgattcagtgttaaaaacagaacgtaaacaactaattttagaggagttaaatcaacatcatgtagtttctctagaaaaattagttagtttgctagaaacgtcagaatcaacggttcgaagagacttggatgagttggaagcggaaaacaagcttcgtcgtgtgcatggtggagcagaactcccctactccttacaggaagaagaaaccattcaagaaaaatctgtcaaaaaccttcaagaaaagaaattgctggctcagaaagcagcctctctcattaaagaaaaagatgtcatctttatcgatgctggaacaacaactgcttttttgattcatgaattggtcaataagaatgttacagttgtgaccaactccattcaccatgccgctcagttggttgaaaagcagattccaactgtcatggttggaggaaacgtcaagacggcgacagatgctagtatcgggggcgttgctcttaaccagattaaccaattgcactttgaccgtgcctttatcggaataaatggtgttgacgatggctattatacgactcctgatatggaggagggagctgtgaaaagagctattttggagaatgccaagcagacctacgtcttggtggattcgtcaaaaattggacaaacttgctttgccaaggtagccccactcaaacgcgctatcgttatcactagtcaagggcatgagctcttgcaggttattaaggagaaaacggaggtaatagaagtatgatttatacagtcacactcaatccatccattgactatatcgttcgtttggaccaagtcaaagttggtagtgtcaatcgtatggacagtgatgataagtttgctggtgggaaaggaatcaatgtcagccgtgtcttgaaacgtttgaatataccaaatacagcgacgggatttatcggtggctttactggtaaatttatcacagatactttagcagaggaagaaatcgagacacgttttgtccaggtggcagaagatactcgtatcaatgttaaaatcaaagcagaccaagaaacagaaatcaacggaacgggtccaactgttgaatcggttcagctagaagaattgaaagctattttatctagtctgacagcagaagatacagttgtctttgcaggttcaagtgctaaaaatctaggcaatgttatctataaggatttgatttccttgacgcgccagactggtgcgcaagtggtctgtgactttgaaggacagaccttaattgatagtttggactaccagcctcttcttgtaaaaccaaacaatcatgaacttggagcgatttttggggttaaactcgaaagtttagatgaaattgagaaatacgctcgtgagttactggctaagggtgctcaaaatgttattatctctatggctggtgatggtgcccttcttgtcacatctgagggagcttacttcgctaaaccaatcaaaggaacagtcaaaaattcagttggagctggtgattctatggttgctggattcacaggtgaatttgtcaaatcaaaagacgtagtagaagccttcaaatggggagtggcttgcggaacggcaactaccttctcagatgacttggcaacggcggaatttattaaagaaacatatggaaaagttgaggtagaaaaacgatgaaaattcaagacctattgagaaaagatgtcatgttgctagatttgcaggcaactgaaaaaacagctgtcatcgacgagatgattaaaaatttgacagaccacggttatgtaacagattttgaaacatttaaagaaggaattttggcgcgtgaagctttgacttctactggtttgggtgatggaatcgcaatgcctcacagcaaaaacgctgctgtcaaagaagcgacagttctatttgctaagtcaaataagggtgttgactacgagagcttggatggacaagcaactgacctcttcttcatgattgcagctccagaaggtgccaatgatactcacttggcagccttggcagaattgtctcaatacttgatgaaagacggttttgcagacaaacttcgtcaagcaacatctgcagaccaagttatcgaactttttgaccaagcttcagaaaaaactgaggaacttgttcaagcacctgctaatgactctggtgactttatcgtagctgttacagcttgtacaacaggtattgcccacacttacatggcccaagaagcccttcaaaaagtagctgctgaaatgggggttggtatcaaggtcgaaaccaacggtgctagcggtgttggaaatcaactaactgcagaagatatccgtaaggctaaagctattatcattgcagcagacaaggccgttgaaatggatcgatttgatggaaaaccattgatcaatcgtccagttgctgacggtatccgtaagacagaagagctaattaacttggctctttcaggagatactgaagtctaccgtgccgctaatggtgccaaagctgcaacagcctctaacgaaaaacaaagccttggtggtgccttgtacaaacacttgatgagtggtgtatctcaaatgttaccattcgttatcggtggtggtatcatgattgcccttgccttcttgattgacggtgctttgggtgttccaaatgaaaaccttggcaatcttggttcttaccatgagttagcttctatgttcatgaaaattggtggagctgcctttggtttgatgcttccagtctttgcgggttatgttgcctactctattgctgaaaaaccgggtttggtagcaggtttcgtggctggtgctattgccaaagaaggttttgcctttggtaaaattccttatgccgcaggtggtgaagcaacttcaactcttgcaggtgtctcatctggtttcctaggtgcccttgttggtggatttatcgcaggtgccttggttcttgccatcaagaaatacgttaaagttcctcgttcactcgaaggtgctaaatcaatccttctattgccacttcttggaacaatcttgacaggatttgttatgctagctgtgaatatcccaatggctgcaatcaacactgctatgaatgacttcctaggcggtcttggaggaggttcagctgtccttcttggtatcgtccttggtggaatgatggctgttgacatgggtggaccagttaataaagcagcttatgtctttggtacaggtacgcttgcagcaactgtttcttcaggtggttctgtagccatggcagcagttatggctggaggaatggtgccaccacttgcaatctttgtcgcaactcttcttttcaaagataaatttactaaggaagaacgtaactctggtttgacaaacatcatcatgggcttgtcatttatcactgagggagcgattccatttggtgccgctgacccagctcgtgcgattccaagcttcatccttggttcagcagtagcaggtggactcgttggtcttactggtatcaaactcatggcgccacacggaggaatcttcgttatcgcccttacttcaaatgctctcctttacctcgtttctgtcttggtaggagcaatcgtaagtggtgtggtttatggttacctacgcaaaccacaagcataaaaaatagaaaaatgaaaagattggaccgtttggtgcagtctttttctcttcccgaaatgcctgtgaaatatggtataatagaagaatggcaaacaagaatacaagtacaacaagacggagaccgtctaaagcagaactggaaagaaaagaagcgattcaacgaatgttgatttcgttaggaattgcgattttattgattttcgcagccttcaaattaggggctgcaggtataaccctttataatttaattcgcttgctagtgggtagcctagcttatctggcgatattcggcctattaatctatctcttctttttcaagtggatacgaaaacaggaaggactcttatctggctttttcaccatatttgctggcttactcttgatttttgaggcctacttggtttggaaatatggtttggacaagtccgttctaaaagggaccatggctcaggttgtgacagatctgactggttttcgaacgactagctttgctggagggggcttgatcggggtcgctctttatattccaacagcctttctcttttcaaatatcggaacttactttattggttctatcttgattttagtgggttctctcctagtcagcccttggtctgtttacgatattgctgaatttttcagtagaggctttgccaaatggtgggaagggcacgagcgtcgaaaagaggaacgctttgtcaaacaagaagaaaaagctcgccaaaaggctgagaaagaggctagattagaacaagaagagactgaaaaagccttactcgatttgcctcctgttgatatggaaacgggtgaaattctgacagaggaagctgttcaaaatcttccacctattccagaagaaaagtgggtggaaccagaaatcatcctgcctcaagctgaacttaaattccctgaacaggaagatgactcagatgacgaagatgttcaggtcgatttttcagccaaagaagcccttgaatacaaacttccaagcttacaactctttgcaccagataaaccaaaagatcagtctaaagagaagaaaattgtcagagaaaatatcaaaatcttagaagcaacctttgctagctttggtattaaggtaacagttgaacgggccgaaattgggccatcagtgaccaagtatgaagtcaagccggctgttggtgtaagggtcaaccgcatttccaatctatcagatgacctcgctctagccttggctgccaaagatgtccggattgaagcaccaatccctgggaaatccctaatcggaattgaagtgcccaactccgatattgccactgtatctttccgagaactatgggaacaatcgcaaacgaaagcagaaaatttcttggaaattcctttagggaaggctgttaatggaaccgcaagagcttttgacctttctaaaatgccccacttgctagttgcaggttcaacgggttcagggaagtcagtagcagttaacggcattattgctagcattctcatgaaggcgagaccagatcaagttaaatttatgatggtcgatcccaagatggttgagttatctgtttacaatgatattccccacctcttgattccagtcgtgaccaatccacgcaaagccagcaaggctctgcaaaaggttgtggatgaaatggaaaaccgttatgaactctttgccaaggtgggagttcggaatattgcaggttttaatgccaaggtagaagagttcaattcccagtctgagtacaagcaaattccgctaccattcattgtcgtgattgtggatgagttggctgacctcatgatggtggccagcaaggaagtggaagatgctatcatccgtcttgggcagaaggcgcgtgctgcaggtatccacatgattcttgcaactcagcgtccatctgttgatgtcatctctggtttgattaaggccaatgttccatctcgtgtagcatttgcggtttcatcaggaacagactcccgtacgattttggatgaaaatggagcagaaaaacttcttggtcgaggagacatgctctttaaaccgattgatgaaaatcatccagttcgtctccaaggctcctttatctcggatgacgatgttgagcgcattgtgaacttcatcaagactcaggcagatgcagactacgatgagagttttgatccaggtgaggtttctgaaaatgaaggagaattttcggatggagatgctggtggtgatccgctttttgaagaagctaagtctttggttatcgaaacacagaaagccagtgcgtctatgattcagcgtcgtttatcagttggatttaaccgtgcgacccgtctcatggaagaactggagatagcaggtgtcatcggtccagctgaaggtaccaaacctcgaaaagtgttacaacaataaaaaaatagcttctttccaagtttggagggaagctattttagtggctattgattgcttttattttctgaagttggcgcattggactgtttttcgttttcagtagcaggtttacttgaagcaggagtagaagagtcctgagttgctgttttctgatcttcttttttctcttccttgacgctagattttggtgtttcctcttgctgtgttttttcttgactagtgttagtctctttagttggactggtgttttccttaggggattccttttggatttctttgacaatggttgtcgtctggcttgtcgtaggttcttttttaatatttttgttattatccaaggcgttcataatcgtgatacttgcggtaatcaagccaaggatactagcgattgtagcaacggttttttgaaagactgtaaagccttttttgatgtgttctgtttttggttttgaagttctacgatagttagacatacattctctcctttgattatgatttattatactctgtttctttaaaaaaatcttaaaaaaagagaaatttccctttcttgtcgcaagctccgtttcatgatacaatagaggaagtgattttagaaagcgtgagaaacatgatttactttgataattcagcgacgaccaagccttatcctgaagcccttgaaacctatatgcaggtcgcttcaaaaattttaggaaacccatctagtctccatcgtttgggagaccaagcaacacgaatcttagatgcttctcgccaacagattgcagatttaatcggtaagaaaagcgatgaaatcttctttacctcgggtggaacagaaggggataactggcttatcaagggtgtggcctttgaaaaagctcagtttggcaagcacatcattgtttcagccattgaacatccagcagtcaaagagtcagccctctggttgaaaagtcaaggatttgaagtggattttgctccagttgataagaaaggcttggtcgatgttgaggcgttagcaggtttgatacggcatgatacaatcctcgtttccatcatggctgtgaacaatgaaatcggctctatccaacctattgaggctatttcagaattcttggcagacaagccgactatttccttccacgttgatgcggttcaggcgcttgccaaaattccgactgaaaagtatctgacagaacgggtggattgcgcgactttctctagtcacaagttccacggggttcgaggtgttggctttgtctatatcaaatctggcaagaagattacacctcttcttacaggtggtggccaggagcgagattatcgttcgacaactgaaaatgtggcagggattgcagcgacagccaaggccctccgtttgtctatggaaaagctagatatctttaggagcaagactgggcagatgaaggcagtgattcgccaagctcttctgaactatccggatatttttgtcttttcagatgaggaaaactttgcacctcatattctgacttttggaatcaaaggtgttcgaggtgaagtcatcgttcacgcctttgaagactatgatattttcatctcaacaacctcagcttgttcatctaaggcaggaaaaccagccggtaccttgattgccatgggagtggacaaagataaggccaagtcagctgtgcgtcttagcctagacttggaaaatgatatgagtcaggtcgagcagtttttgaccaagttaaaattgatttacaatcaaactagaaaagtaagataggagcattcatgcagtattcagaaattatgattcgctacggagagttgtcaaccaagggtaaaaaccgtatgcgtttcatcaataaacttcgtaataatatttcggacgttttgtctatctatacccaagttaaggtaacagcagatcgcgaccgtgcccacgcttacctcaatggagctgattacacagcagttgcagaatctctcaaacaagtttttggaattcaaaacttttctcctgtttataaggttgaaaaatctgtagaagttttgaagtcttctgtccaagagattatgcgggacatctacaaggaaggtatgacctttaagatttctagcaagcgtagcgaccacaactttgaacttgatagtcgtgaactcaaccaaacacttggaggggctgtattcgaagccattccaaatgtgcaagttcaaatgaaaagtcctgacatcaatcttcaggtggagattcgtgaagaagcagcctatctttcttatgaaaccattcgtggggctggtggtttgccagttggaacttcaggtaaagggatgctcatgttgtcaggagggattgactcacctgtagcaggttatcttgctcttaagcgtggggtggatatcgaggcagttcactttgctagtccaccatatactagtcctggtgccctcaagaaagcgcaggacttgacccgtaaattgaccaagtttggcggaaatatccagtttatagaggtgcctttcacagagattcaagaggaaatcaaagccaaagcgccagaagcttatttgatgactctaactcgtcgctttatgatgcggattactgaccgtattcgtgaggtacgaaatggtttggttatcatcaatggggaaagtctaggtcaagtagccagccaaacccttgaaagtatgaaggctatcaatgctgttaccaacactcccatcattcgtcctgtggttaccatggacaagttggaaatcattgacatcgcccaggaaatcgatacctttgacatttcaatccaaccgtttgaagactgttgtaccatttttgcaccagatcgtccaaaaacaaatcctaaaattaagaatgcggagcagtacgaagcgcgtatggatgttgaaggcttggttgagcgagcagtggctggaatcatgattactgaaatcacacctcaagccgaaaaagatgaagttgatgacttgattgacaatctgctctaattcagaaaatccaaaagaatagcgaaaatcagtaaaaaaagttagttttttctctaaaaacaggtaaaaaactaactttttttatttttatgatataatgatataaaattttgaatatagagagttttctgacaatgaatcaatcctacttttatctaaaaatgaaagaacacaaactcaaggttccttatacaggtaaggagcgccgtgtacgtattcttcttcctaaagattatgagaaagatacagaccgttcctatcctgttgtatactttcatgacgggcaaaatgtttttaatagcaaagagtctttcattggacattcatggaagattatcccagctatcaaacgaaatccggatatcagtcgcatgattgtcgttgctattgacaatgatggtatggggcggatgaatgagtatgcggcttggaagttccaagaatctcctatcccagggcagcagtttggtggtaagggtgtggagtatgctgagtttgtcatggaggtggtcaagccttttatcgatgagacctatcgtacaaaagcagactgccagcatacggctatgattggttcctcactaggaggcaatattacccagtttatcggtttggaataccaagaccaaattggttgcttgggcgttttttcatctgcaaactggctccaccaagaagcctttaaccgctatttcgagtgccagaaactatcgcctgaccagcgcatcttcatctatgtaggaacagaagaagcagatgatacagacaagaccttgatggatggcaatatcaaacaagcctatatcgactcgtcgctttgctattaccatgatttgatagcagggggagtacatctggataatcttgtgctaaaagttcagtctggtgccatccatagtgaaatcccttggtcagaaaatctaccagattgtctgagattttttgcagaaaaatggtaagttaagaaaggaaaaaacgaaatgcatattgaacatcttagccactggagtggtcatcttaaccgtgaaatgtaccttaaccgttatggacatggtgggattccagttgtggtctttgcttcatcaggtggtagtcacaacgaatactatgattttggcatgattgatgcctgtgcttcctttatcgaggaaggccttgtccagttctttaccctatctagtttggatagtgagagctggttggctacttggaaaaatgctcatgaccaagcggaaatgcaccgtgcctacgaacgttatgtgattgaggaggccattcttttatcaagcacaagacaggttggtttgatggcatgatgacgacaggttgctctatgggagcctatcatgcactcaatttcttcctccagcatccagatgtctttaccaaagtgattgctctcagtggtgtttacgacgcacgtttctttgtcggtgattactacaacgatgatgctatttaccaaaactcgccagtagattatatttggaaccaaaacgacggctggtttattgaccgttaccgtcaggcagagattgtgctgtgtacggggcttggagcctgggaacaagatggtttgccatccttttacaagctcaaagaagcctttgacaagaaacaaattccagcctggtttgctgaatggggacatgatgtcgcccatgactgggaatggtggcgtaaacaaatgccttatttcctcggtaatctctatttataaaaggagttacctatgaattaccttgttatttctccctactatccacaaaactttcaacagtttaccatcgaactagctaataaaggcatcacagtcttgggaattggtcaagagtcttacgagcaattggatgagcccttgcgcaatagcttgaccgagtattttcgtgttgataatcttgagaacatagatgaagtcaaacgtgcagttgcttttctcttttataaacatggtccaattggccgcatcgagtctcacaatgaatactggcttgagctagacgcaacactcagagaacaattcaatgtttttggtgccaaaccagaggatctcaaaaagacgaaatataagtctgaaatgaagaaacttttcaaaaaagcaggtgttcctgtggtacctggagctgttatcaagacggaagcagatgttgatcaagcagtgaaagaaatcggtcttccaatgattgccaaacctgataatggagtgggagcagccgcaacctttaaacttgagacagaagacgatatcaatcacttcaagcaagaatgggaccattcaaccctttatttctttgaaaaatttgtcacttccagcgaaatctgtacctttgacgggctcgtggacaaggatggaaagattgtcttctcaacaacctttgactacgcctatacaccgcttgacctcatgatttataagatggacaattcttattatgtgctcaaggatatggatcctaaactgcgcaagtatggggaagcaattgtcaaagaatttggtatgaaagaacggtttttccatattgagttcttccgtgagggggacgattatattaccatcgagtacaataaccgccctgcaggtggttttaccattgatgtttataactttgctcattccttggacctttatcgtggctatgcagctattgtcgcaggagaggagttcccggcgtcagactttgaaactcagtattgtttggctacttctcgccgtgcaaatgctcactatgtttattcagaagaggatttgcttgccaaatatagccagcagttcaaggttaaaaaagtcatgccagctgccttcgcggaacttcaaggagattacctgtatatgctgaccactccgagtcgacaagaaatggagcagatgattgcagatttcggacaacgtcaagaataagaactatcggattaaggaaattaactcccttaatccttttgttttgtctgataaaaaataagagcatcccaacaaggtagctatcataaaacttgttcgataactatttgaagcaggattaggtggtcagaaattaaattttaatatttcaattgagtcatagtattgtgtttgcgtatccttaaatcagctaaaaggatccatgacgacacctatacgatatagttttcaagataccaaacaagtctattaatattcaatgaaaatcaaagagcaaactaggaagctagccgcaggtttctcaaaacactgttttgaggttgtggatagaactgacagagtcagtatcatatactacggcaaggtgaagctgacgtggtttgaagagattttcgaagagtataaaatattcaggtgacgcatagatatagttaattgaagctttgtttgaaatctgataaaataatgatattactaagttttaaaaactaaagaaaagggaagatatgattacaggcgaattaaaaaataaaatcgatcagctgtgggaaattctttggacagaaggaaacgcaaatcctttaacaaatattgaacagttgacttatctcttatttatgaaagatttggatagtgtcgagcttggacgtgaaagtgatgctgaatttctagggattccttatgagggagtttttccaaaagataaacctgaataccgttggtcaacttttaaaaatataggagatgctcaggaagtttatcgtttaatgactcaggagatttttccgtttattaaaaatctcaagggggatacagatgatacagccttttcacgatatatgcgagaagctatttttcaaataaataaacctgctacgcttcaaaaggcaatttctatcttagatgtttttccaactaggggattagatgtagattttgataatgacaaacaaagtattactgatatcggagatatctatgaatatctgttatcaaaattgtcgaccgcaggtaaaaatggacagttccgtacacctcgtcacatcatcgatatgatggttgagttgatgcaaccgactatcaaagatatcatctcagatcccgctatgggttctgctggcttcttagtatctgctagccgttacttaaagcgtaagaaagatgaatgggaaaccaatacagataatatcaatcattttcataatcagatgtttcatggaaatgatacggatacgactatgttgagacttggggcgatgaacatgatgctacatggagtagaaaatccacaaatcagttaccttgactcgctgtctcaagataatgaagaagccgataaatatactttggttttagcaaatcctccttttaagggctcacttgactacaattcaacctctaatgaccttcttgcaaccgtaaaaaccaaaaaaacagaattactctttctttctcttttcttgcgaactttaaaaccaggtggacgagcagcagttatcgtacctgatggtgtcctttttggttcgtctaaagctcataaaggaattcgtcaggaaattgtagagaatcataagcttgatgctgtaatctcaatgcctagtggtgtgttcaagccttatgctggagtttcaactgccattctcatctttacaaaaactggtaatggtggtactgacaaagtctggttttacgatatgaaagcggatggtttaagtttggatgataagcgacaaccgattagcgacaatgatattccagatattatcgaacgctttcatcatcttgaaaaagaagcagaacgtcagagaacggatcaatctttctttgttccagttgctgagataaaggaaaatgattatgatttgtctatcaataaatataaagagattgagtatgaaaaagttgagtatgaaccaacagaagtcatattaaagaaaatcaatgatttagaaaaagaaattcaagctggcttggctgaattggaaaaattactcaagtagggaggtggctgtatgaaaaaagtgaagttgggggaagtcttatctctaaaaaaaggcaagaaagccactgtacttgctgaacaaacaactctaagccaacgttatattcaaatagatgatttaagaaataataataatttaaaattcactgaaagtttaaatatgactgaagcactcccagatgatattctgatagcatgggatggagctaatgcaggaacagttggttatggattatcgggagctgttggtagtacaattacggtcttaaaaaagaatgagcgatacaaagaaaaaattatatcagattacttgggagtctttttggaaagtaaatcgcagtatttacgagatcattcaacaggtgcaacaattcctcatttaaacaagaatatattacttgatttacaattagaattgctaggtatcgaagaacaagagaacattatctgtattcttaatacgattaaaaggcttattactaaaagaaaatttcagttagatgaactaaacttgctcgtcaaatcccgatttaacgagatgtttggggaaaataaaatatttgaaagcattgataacttatttgatattatagatggtgataggggcaaaaattatcctaaatcagatgagttgtttagtgaggagtactgtttatttttaaatacaaagaatgttactaaaaacggattttcattcgatacaaagcaatttatcactaaaacaaaggataaattacttcgaaaaggcaaacttgagcgttatgatatagtcttgacaacaagaggtactgttggaaatgtagcgtactacgatgaattaataaaatataaacatttacgtataaattcaggtatggtaatattacgtcccaagacaccaaatctaaatcagaaatttattatccatgttttaaggaataataattatagtcgagtgatatcaggaagtgctcagcctcagttaccaattacaaaattaaaaaaaatacttctccccctccccccactagccctccaaaatgagttcgcagactttgtagtccaggtcgacaaatcacaattggcaatccaaaaatctctggaagaacttgaaactttgaagaaatctctgatgcaggagtattttggctgatattctgccattgtaattacggtaatgatttgttataatacttcaaaggaggaaatcagatggtagtaaaaacaagaaaacaaggaaattcaatcaccattacgattccaagtgaatttaatattccaagtggtgttaaatacgaagcgaaattgttaccaagtggtgagattatctttactcctgaagaattggggcagcaggtttcttatgtatctgatgatgcctttgacttaaatttagataaaatatttgacgaatacgacgatgttttcaaagctttggtggaaaaatgacaatctatttgacagaaaagcaaattgaaaaaataaatgctttagcaattcaacggtattctccaaatgagaaaattcaaacagttagtccttctgccttaaatatgattgtgaacttaccagaacaatttgtctttgggaagcctctttatccaacaatttttgataaagcaacgatactatttgtccaattgataaagaagcatgtttttgctaatgctaataaaagaactgctttcttcgttttggtcaaatttttacaattaaacggctatcgtttttctgtaacggtagaagaagcagtaaaaatgtgtgtaaccatcgcagtagaagctttaactgatgaaaaaatgacaagctactccaaatggatttctgaacattctgttagagaaaaggtcaaaaagtaacctagtatgctggatttgaatgagcacaagaaaataaatgaacagacaatattagaattctgtaatgcagaaactgatattgtctctttttattgatgaataagaaagtgagaaattatggaatcaaaagttacaattatcatgcaagaaatgttacctcttttaaataatgaacaattactagcgttgagagagagtttagaacatcatctagtagacggaaaaaagcagcagaagtattcgaataataacctgttgcaactatttattaccgccaagcaggtagagggctgtagctcaaaaacaattcgttattatcagaggacgattgaaaacttgtttaatgctattaaagagtctgtgacacaactcacaacagatgatttaaggagttatttagcaaattaccagtctgaaaaggattgtagtaaggcaaatttagacaatattaggcgtatattgtcttctttttttgcttggcttgagcaagaggaatatatcattaaaaatcccattcgacggataaagaaaattaagactgagcaaaatgtgaaggaaacttatactgatgaacatttggaaattatgcgtgataactgtgaaaatttgagagatttggcaataatagacctactagcatcgacaggtatgcgtgtaggggagcttgtacagttgaatcgttcagatattgattttgaaaacagagagtgtgttgtctttggtaaaggaaagaaggagagaccagtatattttgacgctcgtacgaaaattcatttaagaaattatcttaacgacagaaaagatagtcaccctgctctttttgtaacgctagttggaaaagtccagaggcttggaattgctggtgtagagattcgcttaagaaagttaggagacaaactcggcatacaaaaggttcacccacataagttcagaagaactttagcgactaaggcaattgataaaggtatgcctatcgaacaagtccaaaaactgctaggtcatagcaagattgacacaaccttggcctatgccatggtcaatcaaaataatgtcaagcattcacaccaaaaattcatctcttaaaagcaaatcccgatttaacgagatgtttggggaaaataaaatatttgaaagcattgataacttatttgatattatagatggtgataggggcaaaaattatcctaaatcagatgagttgtttagtgaggagtactgtttatttttaaatacaaagaatgttactaaaaacggattttcattcgatacaaagcaatttatcactaaaacaaaggataaattacttcgaaaaggcaaacttgagcgttatgatatagtcttgacaacaagaggtactgttggaaatgtagcgtactacgatgaattaataaaatataaacatttacgtataaattcaggtatggtaatattacgtcccaagacaccaaatctaaatcagaaatttattatccatgttttaaggaataataattatagtcgagtgatatcaggaagtgctcagcctcagttaccaattacaaaattaaaaaaaatacttctccccctccccccactagccctccaaaatgagttcgcagactttgtagtccaggtcgacaaatcacaatttgcttgtgagatagctataaaagtgtggagaaatagcttgaaatttagtataatatagctaaactatttgtttaaagtgagaaaaaaatgggaaattttagctttcttttaaaaaatgacgaatatgaatctttttcaaaaccttgcattgaagctgagaatatgattgctacatcaactgtggctactgcctttatggcgcgtcgtgctttagagcaggctgtccattggatatatagtcacgattcatatttagaagctccctatcgtgctactctatcttctttagtatgggatgatgattttagggatatcgtagattctgaactccacaagcagatagttctgttgattcggtggggaaaccatgctgctcatggtggtgaaattaaggaacgagaagcgattttagctttgcatcatttgtatcagtttgttaattttatcgattattgttacagcaatgagtttgtggagcgttattttgatgagaagtgcttaccactttcagcaaacatcaaataccgagaaactccacaatctatgataaagttacaagacagtttaccagaactgcctgattttcatgaacagatggctgctcagtccgtagaagttcaagagacttatactgaaaaacgtgagactgcagcgcaacggcaagatgtgcctttccatattgatcaattatctgaggcagagacaagaaagctctttattgatatcgatctccgtttagcaggatggatatttgaagaaaactgtcgtgttgagatagccgttgatggtctcaagcacggttcaggaattggttactgtgactatgtactttatggtaaaaatgggaaaattttagcgattgtggaggctaaaaaagcctctgtcaatccagaagtaggggaagtacaggtcaaagaatatgctgaagctttggagaaacatatcggctatcagccaatttgctttattacaaatgggttgaagcactatatacttgatggtccgaaccgccgccagattgcaggcttttactctcaagaagaattgcaattagtgatggatagacgtcatcttcaaaaaccgcttgaggatatttctagtaaaattagggacgatatttccgggcgtcactaccaaaaacatgccattgcaagcgtttgtgaagctttctctgatcatcgtagacaggcacttttggttatggcaactggggcggggaaaactcgtacagcagtttctctagttgatatcttatcacgtcataactgggtaaaaaacgttctcttcttagccgatagaacttccttggttaagcaagcatatgattcgtttagaaaattactcccagatctttccgtttgtaacttcttagaagataaagaaggagctcaatcaagtcgcatggtcttttcaacttatccgaccatgattggagcgattagtggtcaagaagaagtaaatcaacgccctttcactgttgggcattttgaccttatcataattgacgaatctcaccgttctatttatcagaaatacaagtccatttttgattattttgatgcaagaattgtaggcttaacagctactccgcgtcaagatttagataaaaacacctatggattctttaatttggagaatggggttccaacatatgcatatgatttggaagaggctgttaaagacggatatttagtagcctatcattctatcgaaaccaaactgaaactacctacggatggtctacattatgatgatttgtccgaagaagaaaaggaacattttgatagcaaatttgaagacaatagctgtgaaaaagatattgatgggagtgtatttaattcctttattttcaataaaagtacagtagaaattgttttaaatgaactcatgacaagaggaattcagacagcctcgggtgatgaaattggtaaaactattatttttgctaaaaatcatgatcatgcggaatatatcagaggtatttttaacaaccgctatcctgaaaaagggagcgactatgctcaggtgattgattatagtattaagcattatcagaccttgattgatgattttaaaattaaggagaagtatcctcaaattgcgatttctgtcgatatgttagatacaggtattgatgtaccagaggttgttaatttagtcttcttcaagaaagtacgctctaaaactaagttttggcagatgattggtcgaggaacccgtctatgtaaagatttatttggacctgagcaggataaggaaaacttcttggtatttgattatggggacaattttgattattttcgtgcagatccaagagatggagagggtcgtcacattgtttcgctgactcagcgtttatttaatatcaaagtggacttgattcgagaacttcagggactccaataccaagaagatcagtttgcgagagcataccgtcagcagcttgtctcggaacttcaaggtcgtatagagagcttaaatgagttggacttcagggttcgtatggttttagatacagtttatagctataggaaattggaaagttggcagaatctaactgctgttacaagtgaaaccattcaaaaaaatctctctccgcttttatttgatgaagataaagaagatgagatggcgaggagatttgatttgtggttgcttcatattcagttggggcaactgacagctaaatcttccactgttcatatttcccaagtgatgaagacggctagagctctttctgctattggcaatatcccgcaggtttttgagcaggctgaaattatcaggaaagtacaggagcctgaattttggaaagaagttaacttgtctgatttggaaaaaattcgtcttgctattcgagatttattacagtttttggataaaacagaccgtaaaccctactatgttaactttgaagatcgtatactctccactgttcacgagaccacagcatttttgcaggtcaacgatcttcggtcttacaatgaaaaagttgagcattatttgaaaactcatctggatgaggagtccatttctaagctataccataataaaaagttgacatctgatgatatgcttgcacttgaaaaattgctttgggaaaaattaggtagtaaagcagactaccaaagtcattatgaaaataaggcaattccgagattggttcgtgagattattggcttagatagagagtctgccaatcgtattttttctaaatttttgtcggatgagaatcttaatgccaggcagatttcatttgtaaaattgattgtagactacattgtagaaaatggttttttagagacgaaagtgttaacgcaagagccgtttaaatcttatggttctgttcaactactcttccaacaccaactaccagtacttcgtaatattgttcaaatcattgaacttatcaataatcgagctggagaagcggcttaaattctaaagtgattgccatgctgagactcatttaaaattaaaaagagtagaaatttatgctatatatgagaagttttattaggaagaatgtcatcgttttcctagaatacagtatcagttgttaagtggttgataaatttcaaagtagatacttgtaccacgatgtttgttgatcgagttattaacaaaagagctactttgattttaaagaaatagaaaacaaaaagccgagcaagaattcaattgcaggagaaaatgaaataatactcaatgaaaatcaaagagcaaactaggaaactagctgcaggctgctcaaaacactgttttgaggttgcagatggaagctgacgcggattgaagagattttcgaagagtataaatcttcctaggataaagcaaaacgcatagtatcaagggttttcaacacttgatactatgcgttttctgatgttaaagactttctaccaggttttttaaaagcataattgttagttgtagtcatttattattcttcaaagaaaaatggtggggcgaattttttcagttcttcaaagcacttttgagcagtatctgcatcttcacagatgataagacagacatcattaccacaaagggtagcgatagcgtcagggaagctcaaagtatcaatgatagaaccaaaggattgagccagtccaggaagggtttttagtaggacttggtgttgaactgggcgcatccagacaagggcgtcttccatgtagagttcgagacgtttttcccattttgagatggaaccattgttaagaacataataagcgctatcttcttcgcggacttttgataggttcatatttttgatgtcgcgtgagagggttgcctgggttacttgaatgtcgttctcagcaagaagggcttgcaactcagcctgtgtatgaatcttgttttttgtgataagagcgcgtataagttggtggcggtgttctgatttattcataataatgtaactccttttagcaaggtaaggtaagcatggactgagcgaggtcgacagtcaagtggtagtctgtattgtcacggatggtgatttcaaagtcagtagtatagaggactaaacggagagtgtctccttcttttagcttgtaaatagttggctgcagttcaaattgaacgtccatccattcatctgcagtaatatcctctactaacagtaaatcatttctattttgtaaattaaggtaaccttttgtcacgactcgttgtgcctctggtctaaatggcaattcacagagattttccaacatgtgatagcgaccgttgtcaatggttctagcacttaaaatagctggataaggttgtaggtatttcttttgcccaaattctagcagttgggcagataagagccccttgtttgtactggatttgatacgaagattgagctgagcgcgaccgtttaggtggagatctttagtcacaggaaggttaatagtaatctgattggctttcccttgatagagctctgtattgaaggtttggtatgtcttaccatagcgctcaaaatccttatctgggtactggttttgaatagcttgctcttcttgaccaagtgagaaggtttcacagttttcttgcccaccgaagttatcaagtgataaccaagtctgtggagctgtattgtcctgccagataacagtaggaagttgaaagtctgtttcctgtcctagtaatttcttggtcaataaggcatttatggactcacggaagtcaattgattgccaattgttcatgtaaacatgggcaccattatggaaaaagagatgcttgtgtatatgagtaggaagagcatggaacatctggtaaacatgaagtggtttgacattccaatcctgagaaccatgagtaaagacaacctctgcctttactttatgggcattgagcagataattgcggtcatgccaaaactgattgtagtccccagtttttcggtctagctgagctttcactttttctaagtcagcttggtgagcttcattgccacggatatagtcgccagctaagagattacgagaataggttaactcagcaagggagtcaaagtcctcacctggataaccacctgggctagtcaccagaccgttttcacggtagtagttgtaccatgatgaaattcctgcctcggcaatgataacttctaaaccatcgactcctgtagtcgcaagaccattggacatggtacctagataggaaagtcctgttgtagcaacttttccgtttgaccaatcagccttgacttgacgctggcgcgtgtgatcagtaaaggcacggcaacgaccgttaagccaatcgatgacatttttataagcctcgatttgctggtagtctccattagtcatgaaacctgtcgagtctttggtaccaacacctgagacatagagattggcaaagcctctcggaaggaagtagtcgtttagtgtatagctagagttgatgtgagttagcttttcctcagcctctgctataagctcagctttaccttggggttggacgagatttagttgaggtttctctagctcaatcttgtgaggaagcttaacctcaagctcgccctccatcttgtagagagccttgtcactagccttgtcattggttccctgatgataagggctggctgtcatgatggcagggatttttccatcaaaacgagggcgaataatgctaacctttactaggtctgatagccctttttggtcagtatcgacacgagactcaacgtaaacgacttcacgaatgacatcctggttagaaaaagtagccaaactcttgccgttaaagtagtggtagtcattatcctccggaataagaccatcactaacaagttggtcgataagagtatttccttttttggtgcgagtattgagtaactgatagagattttcaatcaagtcaccatatataatgggaaatccagtttctttacgaaaaacgtcactatcttcgaagtcaaccaaataagaaaagcctaaaagttgaaaagcaacagtataaaaaatatctgctgtcagttcatcttctgattgaaaaaatgtcagcaggtctgtttttttatcagctgctaggatagaaagtgggtagttggtgtcttgataagtgaaaaagaaacgacgtaaaaaggtttcaagtgagtctttgtgattggctgtattttgtaaatcaaagccacatttttttagttcagataagacattttcttttggaaaattgatataactatattgattaaaacgcatagaacctccatatagaatgacagttaaggttattatatcaaaaaaaaagcagaaagggaattgttaacttcaaaaggaaataatccaataaaaatgaataaagtactaaattcaatatagagaacagagtaacaataagaataaatagatagggtataaaagttctaggagatttatattatatgctttctatttttatatacaatatagtataaatataaaaatgatgacaaaaatacaaatgaatagaaaataaattagtaagctgatgaaatttttctcaagagaagccatttataggtgaaaatggtataatatagtgagaaggatagaggagaagtgtaaattgatcgcacaactagatacaaaaacagtctatagttttatggaaagcgtcatttcgatcgaaaagtatgtgagagcagctaaagaatacggctacactcatttggctatgatggatattgacaatctttatggcgctttcgactttctagagattacaaaaaaatacggcattcatcctttgctagggcttgaaatgacagtgtttgtagatgatcagggagtgaatttgcgctttttagctctatctagtgtgggctatcagcagttgatgaagctttcgacagccaagatgcagggggagaaaacttggtcagtcctgtcccagtacctggaggatatcgcggtcattgtgccttattttgatagagttgagtcgttagaactaggctgtgattactatataggggtttatccagaaacactagcaagcgaatttcatcatcctatcttacctctttatcgggtcaacgcttttgaaagcagggatagagaagttcttcaagttttaacagcgattaaagaaaatctaccgctcagagaagttcccttgcgttcgagacaagatgtctttatatcagcaagttctttagagaaactattccaagagcgttttccgcaagctttggacaatttagaaaagcttatttcaggcatttcttacgacttggatactagtctgaaactgcctcgttttaatccagctagaccagcagtagaggagttgagagagcgtgctgaactggggcttgttcagaaggggttgactagtaaagaatatcaagatagactagaccaagaattgtctgttattcatgatatgggctttgatgattatttcttggttgtttgggatttgttgcgttttggacaatcgaatggctattatatgggaatgggaaggggttctgcagtaggcagtttggtttcttatgccttagacatcacggggattgacccagtagagaaaaatctgatttttgaacgctttcttaatcgtgaacgctataccatgcctgatattgatattgatatcccagatatttatcgtccagattttatcagatatgttggtaataaatatggtagtaaacatgcggcacaaatcgttactttttcaacctttggagccaagcaagctcttcgagatgtcttgaaacgctttggtgtgccagagtatgaattatctgcaattactaagaaaatcagttttcgtgacaatcttaagtcggcctatgagggaaatctccagtttcgtcagcaaatcaatagtaagttagaataccaaaaagcttttgagattgcttgcaagatagagggctatccaaggcaaacctctgtccatgcggctggtgttgtaattagtgaccaagatttaaccaactacattcctctaaagtatggtgatgaaattccactgactcagtatgatgctcatggagttgaggctagcggacttttgaagatggactttctgggactacgaaatttgacctttgtccagaagatgcaagagttgcttgctgaaacagaaggtattcatctgaaaattgaagaaatcgatttagaagacaaagaaacgttagctttatttgcctctggtaatacaaaaggtatctttcaatttgagcaaccaggtgccattcgtctgcttaagcgtgtgcaaccagtctgttttgaagatgtcgtcgcgactacttctctaaatcgaccgggtgctagtgactatatcaataattttgtggcaagaaagcatgggcaggaagaagtgactgttctggatccagtactggaggatattttggctccaacctacggcataatgctctatcaggagcaggttatgcaggttgcccagcgacttgccggatttagtcttgggaaagccgatattttgcgtcgggctatggggaaaaaggatgcctctgccatgcatgagatgagggcttcctttattcaaggttcattagaagctggtcatactgtggaaaaagcagagcaggtctttgatgttatggagaagtttgcaggttatggttttaacaggtcacacgcctatgcctactcagccttggccttccagttggcttatttcaaaacgcattatccagccattttttatcaggtcatgttaaattcttccaacagtgattacttaatagatgcacttgaagcaggttttgaagtagcctctctatccatcaacaccattccctatcacgataaaattgccaacaaggccatctatctaggtttgaaatccattaaaggagtcagtaatgatttagctctctggattattgaaaatagaccttattctaacattgaagattttatagctaaattacctgagaattatctgaaacttcctctgctagaacctttggtaaaagttggtcttttcgattcatttgaaaaaaatcgtcaaaaagtatttaataacttagctaatctatttgaatttgtgaaagagttgggaagtttgtttggagatgctatttatagttggcaggaatcggaagattggacggaacaagaaaaattttatatggaacaagagcttttagggataggtgtcagcaaacatccactacaagctattgcaagtaaggctatttacccgattaccccaatcggaaatttgtcagaaaatagctatgctattatcttggttgaagttcagaaaataaaagtgattcgtaccaaaaagggtgaaaatatggccttcttacaggcagatgatagtaagaaaaaattggatgtcactctcttttcagacttatatcgtcaggttggacaggaaataaaagagggagccttctactatgtaaaaggaaaaatacaatcacgtgatggccgtctgcaaatgattgcacaagaaataagagaagcagttgctgaacgcttttggatacaggtgaaaaatcatgaatcggatcaagaaatttcacgcattttagaacaatttaaaggcccaatcccagtcatcatccggtatgaagaggaacagaaaaccatcgtttctccccatcattttgtagctaaatccaatgaattagaggagaaattgaatgaaatcgttatgaaaacgatttatcgctaaaaatacggaaaatagaagaattttcaacgtaaatgtggtataatcagtaagaatgttaaaagaaaaaggagcataaccaatatgaaacgtattgctgttttgactagtggtggagacgcccctggtatgaacgctgccatccgtgcagttgttcgtcaagcaatttcagaaggaatggaagtttttggtatctatgacggatatgctggtatggttgccggtgaaattcatcccctagatgcagcttcagtaggggacatcatttctcgtggtggtactttccttcactcagctcgttacccagagttcgctcaacttgaagggcaacttaaagggattgagcaattgaaaaaacacggaattgaaggtgtagttgttatcggtggtgacggatcttaccacggcgctatgcgtttgactgaacatggcttcccagctattggtcttccaggtacaatcgataacgatatcgttggtactgactttacaatcggttttgacacagcggttactactgccatggacgctatcgataagattcgtgatacatcatcaagtcaccgtcgtacttttgtaatcgaagttatgggacgtaacgctggtgatatcgctctttgggctggtattgcaactggtgctgatgaaatcatcatccctgaagcaggcttcaagatggaagatatcgtagcaagcatcaaagctggttatgaatgtggtaaaaaacacaatattatcgtcttagctgaaggtgtgatgtcagcggctgaatttggtcaaaaacttaaagaagctggagatacaagcgaccttcgtgtaacagaacttggacatattcaacgtggtggttctccaactgcgcgtgaccgtgttttggcgtcacgtatgggtgcacatgctgttaaacttcttaaagaaggtatcggtggtgttgcggttggtattcgtaacgaaaaaatggttgaaaatccaattcttggtactgcagaagaaggggcattgtttagccttactgcagaaggtaagattgtggttaacaacccacacaaagccgatattgagctatctagcttgaataagagcttgtcataatttacaatttagttaataagaccaaaaaggtcatatatataaaggagtcacaaaaatcatgaacaaacgtgtaaaaatcgttgcaactttgggtcctgcggtagaaatccgtggtggtaaaaaattcggtgaggacggatactggggtgaaaaacttgatgttgaagcttcagctaaaaacattgctaaattgattgaagctggtgctaacacattccgattcaacttctcacacggcgaccaccaagaacaaggtgagcgtatggcaactgttaaacttgcggaaaaaattgcaggtaaaaaagttggtttccttcttgatacaaaaggacctgaaatccgtacagaattgttcgaaggtgaagctaaagaatattcatacaaaactggtgaaaaaattcgtgttgcaactaaacaaggaatcaaatcaactcgtgaagtgattgcgttgaacgttgctggtgctcttgatatctatgatgatgttgaagttggtcgtcaagttttggttgacgatggtaaacttggtcttcgtgtggttgctaaagatgatgcaactcgtgaatttgaagttgaagttgaaaacgatggtatcatcgctaaacaaaaaggtgtgaacatccctaacactaaaattcctttcccagctcttgctgaacgcgataacgacgatatccgtttcggtcttgaacaaggtatcaacttcatcgcaatttcattcgtacgtactgcaaaagatgtgaacgaagttcgtgcaatctgtgaagaaactggaaacggacatgttcaattgttcgctaaaatcgaaaaccaacaaggtatcgataacttagatgaaatcatcgaagcagctgatggtattatgattgctcgtggtgatatgggtatcgaagtaccgttcgaaatggttccagtttatcaaaaaatgattatcaagaaagtcaatgctgcaggtaaagttgttatcactgcaacaaacatgcttgaaacaatgactgaaaaaccacgtgcaactcgttcagaagtatcagatgtattcaacgctgttatcgacggaactgacgctacaatgttgtcaggcgagtctgcaaacggtaaatacccactcgagtcagtaactacaatggctacaatcgacaagaacgctcaagctcttcttaatgaatacggacgtcttgattcagattcatttgagcgtaactctaagacagaagtaatggcttctgctgttaaagatgctactagctcaatggatatcaaattggttgtaactcttactaagacaggtcatactgcacgtttgatttctaaataccgtccaaatgctgacatcttagcattgacatttgacgaattgacagaacgtggcttgatgttgaactggggtgttatcccaatgttgacagatgctccatcttcaactgacgatatgttcgaaatcgctgaacgtaaagcggtagaagcaggtctcgttgagtcaggcgatgatatcgttatcgttgctggtgtgccagtaggagaagctgttcgcacaaacacaatgcgtatccgcacagtacgttaagaaaaatataaaaacctatcatatccagctttagagcttgtgtgataggctttttgtatagagggtaagaaataggcaaaactttcataatggattgatactcttcgaaaatctcttcaaaccacgtcagcgtcgccttaccgtatatatgttactgacttcgtcagttctatctacaacctcaaagcagtgctttgagcaacctgcggctagcttcctagtttgctctttgattttcattgagtatgaaataagatatgcacaaattgattagaaagtcaaatgaatttctacaaatgttttagcaatcgtaatgtacttgtctagattcgatctgatatattttcgatttaatgatatggtatttaaaacctccaaagtagcttactccattcttttacttacgtgagtgtagatgttatttactgttttagcgtttttgtgttccactctaaccattatagcattcttctcagctagtgtactaaggagtgtgtgcctgaaaatatgggaactaaggggctggtttatcggtttctctagtttagtatttgccttttgcaaagtgatcttaaatgcctttctctaaatttacatatcactattgtttaacaaaatctaatctattttaggtcacttattctttttttgaaatgtagaatgaactttttcaaagtttttcgaatcttttaaaatctgtttgctttatatcgccattctccccccttttttaattctccctatatagcctgacagctttcccgatggtacgaatatggttgctttcgtctaggtggatgtcggggtattcgggattgagtttttttgaggcagccttggcggagtttcttgacatagttagtgccgtctacttggaagatgccgatggtattatagtcaatctgtggggtattcttgataaataggtagtcgctgtttcttatctttggctccatggacttgctgacgacataagcgattgggtcgtagtcgtctgggataatggaaactccatatctaaatcgttgtcctgcatcgagcggctacctgcagagataaactacctaacacgagagtaagtagtctgtctgtagtcgtccagtctgatgatttttacgatacttcgtttttctgatcatacagttgcctctcggcataggtcagaactttaccttgtctgggtggttcccgttggtcgtagatagattggatatcgctaggagaatccttttgaactggaggaaagagggcatcgatcaagctactgaatactttaactaagtcaaatatagtatttttcttagtagacctaacccttttttcataatttctaatggtgtttttacttatacctatcttagtacccaattcttattgagtccaaccattactagtctatattgttttatagttgattgagtttggaatagtacgctgtagctgctaaaacatttctagaaattaatttgactttcctaatagagttgttcatatcttatttcaatctattatgtttttcacctctaacaatcgcaatctcttctttatccatgaatgaaatcgctttctatttttgtaagtaaagcataacacgaaatccacgaaaatgaaaacctttgttgtgttttcgtaaaaaatttgttgacagagcacgaaacgcctactataattaaatcaagcttaaggaaataacaaaaaaacaaatcggagggaaagacgatgaacacattaaatgagaaagtaatcaatatctgtaaagcaatagttaaagaaactttaatccaagacatttaggagaaagaaatgaagaaatcaagaaaattagccacattaggaatctgttcagccttgtttttaggcttggctgcttgtcaacaacaacatgctacttctgaggggacgaatcaaaggcaaagcagttcagcgaaagttccatggaaagcttcatacaccaacctaaacaaccaggtaagtacagaagaggtcaaatctctcttatcagctcacttggatccaaatagtgttgatgcattttttaatctcgttaatgactataataccattgtcggctcaactggcttatcaggagatttcacttcctttactcacaccgaatacgatgttgagaaaatcagtcatctctggaatcaaaagaagggcgattttgttgggaccaactgccgtatcaatagttattgtcttttgaaaaattcagtcaccattccaaagcttgaaaagaatgaccagttgcttttcctagataatgatgcgattgataaaggaaaggtctttgattcacaagataaggaagagtttgatattctattttcgagagttccaactgagtcaactacagatgtcaaggttcacgctgaaaagatggaagcattcttctcacaatttcaattcaatgaaaaagctcgaatgctgtctgtagtcttgcacgacaatttggatggcgagtatctgtttgtaggccacgttggggtcttagtacctgctgatgacggtttcttatttgtagagaaattgactttcgaagagccctaccaagcgattaaatttgctagtaaggaagattgctacaagtatttgggcaccaagtatgcggattatacaggcgagggactggctaagccttttatcatggataatgataagtgggttaaactttaatagtgttatgatatgacagtaatcttaggatttttatttctatttttgataagttggtgggttatttcaatcgttaatagccagaaaccacgcaaaaatgaaacatttattggctatgtccaaagatacgatattgatgggaatggctatcaatcattaccgtgtcctcagaactgagaggagttcttgaaatcgtaacaccactttgaacaagagttacttaaacccattggctccgacggattaagttgctttcgtgaataccaaaatcagccgcaatttcttcataagtgcggtattctcgcacatattgaagagtggccataagaaggtcttctaggcttaatttaggttttcgtccaccttttgcgtgtttaagttgataagctgtttttaatacagctaatatctcttcaaaagtcgtgcgctgaacaccaacaagacgtttaaatcgtgcatcagttagttgtttacttgcttcataattcatagaactactataccatattttgtttcgcaggaagtctaatgctaaaatcttatcagtgagaagatttcttaaagtttattctttgtagtttcatctgtattagtacataatttaacttagagaaaataggaggactaatcgaatggaattaaaagattttacagaaaaagaacaggaaatgattaagaaaaggcttacaatgtctaatattagtgacaaagaaactactgagaagattctggcgctagtcccacaagacttgattaagcgaatcccgttttttgtcagaaaacatgctacaacacgtacgattaaacgcatttcaattgaataccctgaactctacgctgtagctcaaacaagtggtgagattccagaaaaaaaacgcgaagaattgcgtcagattatcacaactatctttgaacaaaagatgaataagcatagtattaagtagagaatgaaaaaatattttattggcggtttgggaagcaatgcctatcatagcaaggattttcttcaagaactagattcgcaggtctattttctaaatccatatgaaaagcatcttcgagatgaaacagaattgaaatcatggtttaaaaatgaaattgtagaggaagaatctatctgtctgataggccattctcttggaggagatttagctcgttatttcgcatcggaatttgaagaagtaaagaaactgattcttttggatggtggctatctagatttagataagattttacctttggatacagagttagaggaaactaaaaattatatcaaatctcaaattgtttcggacttagatgttcttacttctaaagaaaaatctgaagcaaagcattggtcagaaaatatggagaaagctgtaagacagtcttatcactggaatgttgagtataatagatatgagttggctataaattatgaaaatatagaagcgatactccgctacggagaaaaatacaagcttttaagagagaagtgggagataccttgtttattagtcctcgctatcctaatgaagctacatggagagaggaagccctaaaagaattgccagactattttgatactatttttttagaaaactttggccatgagctttatactcaagcacctaaagaaatcgctagtctaatgaatgagtggctcgcttattttctatgagctacttgtattgctgggaatggtataagatgaaaatctacaagtcactaattttcatataacaaaaaacgaacaggctctttttctgttattcagaagagaacttgttcgtttttatcttgattttcttaaaaagctctatatacatagggattttctggtttatcgactttggtaaagctgtcgatttccaaggttggaaggttttgtttgagttctttatggtagtgattgaccagttttcctttggctgttatccaagtgttgttttcatactgccgggtattgcccttggtcagcaatccatagacaccagaatctgcgatacagtggataatgccgaatcggaacagaaattgactattggcatgactggggtcgttatagacaaagcctgtaaactggattgtcttgccctcaaactcatctggatagtcgtagatagcctccatgacttccatatagttttcattagtgatctgaatactatcttgggataagtatttatccgccgccgttcgcatttccttttcataggctgattttgaaaaataagaactggtatctggtttcaaatattggcttgtcgtcccttcgcttgtctgaatggctagatccgttccttccgatagggggaaatgataacctttagcagaaacagtctgagaatccaagctaacagttgggaaagttaagccgatgacaagtggaatagccagaagagaaatactcgttatcttggctaatcggctgttcagatgactgtgggttttgacttgcttcatccagatatacaattgaacgatagccaagataaaagaaagcaccatggagatataggccagataggaatagtgcatgttgatgtactggtttagtttgcccgacagatggaggtaaatagtcagttcaaaatagccagctaaaactaaaaatcgaatcataggataactccaatcaagagagaatagactaagacgacaagagttacaattgttatgaagtgactgataaatcgtgctttcaagtaatttttcatcatgagaatatttttgatatccagcattggaccaatgacgagaaaggccagaactggtgccaaaccgaaactcgagagaagagaagcacctataaaggcatccgcctcactacagagcgaaagaagaaaggctaaaatcatcaagagcaggatggcaaaaagaggggtcgcactgatagaggtcagaatccgagtcggaacgtagacctgtattatagaagcaaagaggcagccaaataccaaataacgccccgtatcaaaaaattcatcaatggcctgcacaaagacttgaaaaactttttttgcagaactcaagtaagaaaaatcatgctcatgacaagccagacgattttctttctgaatcggttcttgccagaaaaatcctagaaaaattcctagtattacagccacaagaatggaacccagagctcgtaatagggcgacatggaaggagttgccaaaggcagaataggtcgcaaaaagaacaatgggattgataacaggtgctgtcacaagaaaaggaacggccgtgtaacttggaacctttttttccagaaaacgattgatgatggggacgattccacattcacaagaagggaaaagtataccgacaaaggtcccaaaaaagattctcccccaacgatttcgagggagaaaatgataaaccttgtcaggtgtgatataaacttcaatcagccctgagacaatgcttcctatcagaacgaagggaagggcttcaatgataatggagagaaaaatggctccagtttgaagtacactagatgggagttgttgaaaagcagtcatctagtttttcttttctgctttgacttttttctctttgtcatcagggaaagtaacttgtttcaaatcagggagtttagcaaactcttcaaacatcttgtccaagtcgtctcgttttgtaaatttgacagccataggtgtacctcgattctagattctacctctattatactattattttgcggaaaagggaaaagttaaaatttcaaattgagtagctaagagataatatagcttgatattacctgatatatatcataattgtgctataattaaataaaaagaaaatcattatcagaaaattatgggaggtagtcaaactgacttactcaattagtgttgttttgttacatcaaggagataaaaatagtttattagagtctttgtcaatagtggagagacaaacattaaaagatatagaagttattattgtaaatcaatctacagaggagatagcttccattagccaacagatgaatctatcatttaatattaagattatagatgagaattcttttgctgagttgtctgatatgattacaggagattatattacgtttctatcttcaaatgattcattatttgattggacatttgaaaagatgtatcatgcgataaaattatccgattctgatgttgttcttggtcattttgctgatttggttgatggagtattttacttttatcctttttggggggataattggttgacagaaaatttaacgaatgttcaagttttacaaaagatggatgatacagatcatcgaattagaaaacaatatcgctcattatttggaaaattattcaatagtaagcttttacgaaaaataaatcaatttgatataaacaaccttatttggagactttatattcactctaaaactgcaacctatattaatttcccgacatatatctataaacctgttatagatgctaaacctctaaaagactcctacaaaatcatattagaaaattatgaaaatagaatcaaagattgcgccgtcttagaaaactatgatatagaaagagcgaaaaaacaatatattcaagaattggcaaattttagtgcttggttaaaaaatgacggtgaatatttagattctgatattgtttatcataagttaatagctgcagagaaaggaattttcccttttcttgagcttgatagattagattttacgattataagtaataattgtgttggaggattaatttataaacagcttggttttcaatatagaacaccttttgttggtttatttattcttcctgatgattattataaacttacaaagcattttcgttattatatggaacaagaacttgttttcgaagaggaacttatttcaccgagctggactcatgaagtttatcctttggggcacttaggagatatagatattcattttctacattattctagtattgaagaagcacgaactaagtgggaaaaaagaaaaaaacgcataaattggaataatctttattttaaatttgataataaagattcagctagtgaagaaattttaaataagatggataatcttccttattctaataaattaattttagtcaatcgtccatataaaaatttgaaaagtcaatgtgttattccaggtcaggaacatcttccagaactggctattatgtctgatccattaaatacttttgatatcatggcttggttaaaaaaaggtggcaatgctctttaagtgcaagttattgcgctgtagcatataaatctatttcctacatattttttaaatgttctacgagttaatttgaaacgtttagcttgtggtataatagatttatggataaaaaatatgaaaaaatctctcaggatttgggagtgacgttaaagcaaattgataccgttctaagtttgacagctgaaggggcgactattccctttatcgcgcgttatcgcaaggacatgactggtagtctggatgaggtggcgattaaggctattattgatttggataaaagtctgacaaatctcaatgaccgtaaggaagctgtcttagctaagattcaagaacaaggtaagttgaccaaggaattggaagaagctatcttagttgccgaaaaattagcagacgttgaagaactctatcttccttataaggaaaagcgtcgtaccaaggcaaccattgcccgtgaagctggactctttcctcttgctcgcttgattttgcagaatatagttgacttagagaaagaagctgaaaagttcgtctgtgaaggatttgcgactggcaaggaagccttgaccggtgcagttgatattttggtcgaagccttatcggaagatgtgaccttgcgttctatgacttatcaggaagtgctgagacactctaaacttacttctcaagccaaggatgaaagtcttgatgaaaagcaggtttttcagatttattatgatttttcagagacagttggaactatgcaaggctatcgtaccttggctctcaatcgtggggagaaacttggtgtcttgaagatcggttttgaacatgcgacggaccgtattcttgccttctttgctactcgtttcaaggtgaaaaatgcttatattgatgaagttgttcagcaatccgttaagaaaaaggtcttgcctgctatcgagcgtcgtattcggacagaattaactgagaaagctgaagaaggagctatccaacttttttctgacaatctgcgcaatctcctcttggttgctccactgaaagggcgcgtggttcttggatttgacccagcctttcgtacaggtgccaagctagctgtcgtggatgcaacaggaaaaatgctgacaactcaggttatttatcctgttaaaccagcatcagctcgtcaaatcgaagaagccaagaaagatttagcagatttaattggtcaatacggtgtagagattattgccattggaaatggaacggccagtcgtgaaagtgaagcttttgtagcggaagttctgaaagatttccctgaagtcagctatgttatcgttaatgaaagtggtgcttctgtctattctgccagcgaacttgctcgtcaggagtttccagacttgaccgttgaaaaacgctctgccatttctatcgcccgtcgtttgcaagatcctcttgcggaattggtcaaaatcgatcctaagtcaattggtgtcggtcaataccaacacgatgtcagtcagaagaaactatctgagagtctggactttgttgtcgatacagtggttaaccaagttggtgtcaatgtcaatacagctagcccagctcttctttcacacgtagctggactcaacaaaactatctctgaaaatattgtcaaataccgcgaggaagaaggaaaaatcacttcacgcgcccaaatcaagaaagttcctcgtctgggagccaaggcctttgagcaggctgctggtttccttcgtatccctgaaagtagcaatatccttgataatacaggagttcacccagagaattacactgcagttaaggaactcttcaaacgtttagatattaaagacctaaacgaagaagcccaaagcaaactcaagtcgctttcagtcaaggaaatggcgcaagagttagaccttggtccagaaactcttaaagatatcattgcagatcttctcaaaccaggtcgagatttccgtgattcctttgacgcacctgtgcttcgccaagatgtcctagatatcaaggacttagtggttggacaaaagctagaaggagtggtgcgtaacgttgttgatttcggtgcttttgttgatatcggaattcatgaggacggtctcatccatatttcccatatgagtcgcaagtttatcaaacaccctagtcaagtggtggcagttggagatttggtgagcgtttgggttaagaaaattgatactgaacgtgaaaaagttaatctgtctctcctagctccaaatgaaactgactgattacgtcaagcaggtttcactagaagacttcggcagaccttttatccatcatgtccagtggaataggcgtctacgttcgacaggtgggcgatttttccccaaagatgggcatttggattttaatcccaaggtttatcaggaactggggttggacgtttttaggaaaattgtccgacatgaactctgtcattatcacctctattttcaagggaaaggctatcaacacaaggatcgggattttaaggaactgttgaaagcagtggatggattacggtttgtaccatccttgcccaatagtaactccaagccaatcaagctctatcgttgccaatcctgccagcaaaggtatcagcgtaagcgtaggattgatacccaacgctatcgctgtggactttgtcgaggaaagttgctattagtaaatcagcctgaggactgatgaaagccgagcctatccgtgatatactagtctaacctagcagaaagaggaaatatcatgaacagtaagttttataaaatgagacgaaatcgcatgatttcaggagttttagcaggtctgtcagacaagtggaactttgatgttacccttgtacgttttctgtttgccatttttacagtcgcaaactttggacttggggtgattatctatatcatcctagcttctatcatgccaaccaaggaagaaatcgaagcagaaatgtacggaacaggcccacgtaaacgcaaagaagctcaagccattgacgataatgaaggctggttttggtgaggttttacaaaagatttggaatacgcaaaaagctttaaatcaatagtctaaactgcttgatttaaagcttttttacttttatactcaataaaaatcaaagtgcaaactaggaagccagccgcaggctgtaatttagtcggcaatgtgaagttgatatagtttgcactttgatttttgaatagtattaataatatttcgccagcttcatccacaaactatagtggattggaactagaataggacacctatacttctaaaacattgttagaaatcgatttgactgtcctgatcgatttgtcctgttcttatttcattttactataaaagcagtaatttaaacgcagttttttaatctatttttgctgttgagacaatacatttttggaaaaatggtggatgctgataacaactgataaccagcaaataacataagcagtgccggtaaattctgtactgataaagtgtgtgtgttcaactaagagctgaccgatgaatggagagagcagatagagaagtccgatgagtatatgttctttgtgtttcattaaagcgcaccttctttccttataggttgaacgacttgcaagtgttaaattgaatggtatgttatctaggtaagcttactaaaatgttagttcccgcttcctccttttcaaagtaagccttttcacacttatattttacaactttaaaaataggaaatcaaatcattttctaagtaattttgcttatatttcacccaatcttacaaaaatgtaagattaaagtctcttttgtaaggttaggttatggcaagcggtctttttttgatgtaaactagactcataaagaacaaaggagtaacatcatgaaacaaatcttacataagaaaactagaaaaccaagtcacaaagaaattgagcgcgttcagctgggatgcactatgatgcaagctacatttcatttgatgggatattaagaaaggagattttcatgacacttttagatgtaaaacacgttcaaaaaatttataaaacacgttttcagggcaaccaagtagaagccctcaaggatattcactttaccgtagaaaagggtgactacgttgccatcatgggtgagtctggttctggtaaatcaactcttctcaatattctagctatgttggataaaccaagtcgtggtcaggtttacttgaatggaactgacaccgcaactattaaaaattcacaggcttctagtttccggcgtgaaaagctaggatttgtcttccaagactttaacttgctagatactctgtctgttaaggacaatatcttgcttccgcttgtcttgtcaagaagacctataacggagatgatgaagaaattggtggtgacagctgagaatctgggtattaaccaattgcaagagaagtacccttacgagatttctggtggtcagaaacagcgtgtagcagtagcccgcgccatcatcacagaacctgaaattctccttgcggacgagccaacaggagcccttgattccaagtcatctgcagccttacttgatgtctttaatgaaatcaatgagcgtgggcaaaccatcctcatggtaacccactcaacagcagctgctagcagggccaagcgtgttctctttatcaaagacggcattctttacaaccaaatctaccgtggagagaagacagagcgtcagatgttccaagaaatctctgataccttgactgtcatggcaagcgaggtgaattagtatgtttcgattaaccaataagttagcggtatcgaacttgattaaaaaccgcaaactctactatccctttgcactggctgttctcttggcagtcaccatcacctatctcttttactccctaaccttcaatccaaagattgcggaaatccgtggaggaaccaccattcaagcaacacttggatttggtatgtttgtcgttacccttgcgtcagccattatcgtcctctatgccaatagttttgtcatgaaaaaccgttccaaggaactgggtatatatggcatgttaggcttggagaagcgccatctaatcagtatgacctttaaggagttagtggtatttgggattctaactgttggagcgggtatcggtattggagccttgtttgacaagttaattttcgctttcctgctcaaactaatgaaactgaaggttgagctggttgctaccttccaaatgaatgttgtcattgcagtacttgttgtctttggattgattttcctaggcctcatgttcctgaatgctcttcgaatcgcccgtatgaatgccctccagctctcgcgtgagaaagcaagcggagagaaaagaggtcgcttcctacctctccaaacgattcttggttccataagtttagggattggctattatcttgcccttacggtaaccgatcctcttacagccctaacaactttcttcctagctgttttgctggttatctttggtacttatctattgtttaatgcagggattacagtcttcctacaaatcttaaagaaaaacaagaaatactattaccaacctaataacctcatatctgtttccaacttgattttccgtatgaagaaaaatgcggttggactagcaaccatcgctattttgtcaacaatggttttggtaaccatgtcagcagcgacaagcattttcaattccgcagaaagctttaaaaaagttctaaatcctcatgattttggggtttcagggcaaaatgttgaaaaagaagatttggacaaactcttgagccagtttgcaagtgacaaaggttatagtgtcaaagagaaagaagtacttcgttacagtaactttggtattgcaaatcaagaaggaaccaagttaactatttttgaaaaaggacaaaaccgtgtccaacccacaacagttttcatggtatttgaccaaaaagattatgaaaatatgactggtcaaaaactgtctctatcaggaaatgaggtcggtctctttgccaaaaatgacggactgaaaggacagaaagctctaactctaaatgatcatcaattttctgtcaaagaagaatttaataaagatttcattgtgaaccatgttccaaataagtttaatatcttgactactgattacaattaccttgttgttcctgatttacaagcctttttggatcaattcccagattcggctatctataatcagttttacggtggtatgaatgtaaatgtcagtgaagaagaacaactcaaggtcgctgaggagtatgaaaactacctcaatcaatttaatgctcaattagacacagaaggtagctatgtttatggtagcaatctagcagatgctagttctcagatgagtgccctctttggtggtgtcttctttatcggtattttcctatccattatctttatggtcggaactgttctggtcatctactacaaacaaatttctgaaggctacgaagaccgtgaacgctttattatcttgcagaaagtcggtttggaccaaaagcaaatcaagcaaaccatcaacaaacaggttttaactgttttcttccttcctttgctctttgccttcatacatctcgcctttgcctaccatatgcttagcctgattttaaaagtgattggtgtactggatacgactatgatgttgattgtgaccttgtctatctgcgctatcttcctcatcgcctatgtgctgattttcatgattacttcaagaagttatcgcaagattgtgcaaatgtaaaaaagatacctcgacttcaaaatcgaggtatttcttgtattctaaatgctgaaaagttgtccgagcaggaaggtaactcccatggtcaagagaccaatagcaaggttccgaatcatagctgttttggttggggcttttccaagtctagcacttgtgtaaccagtgagaagaagggccacaccgacaataaggacggtagcagggatgcggtaatcacttggaaaaatggtcactgacagcattggaggcaaacttctaaggaaaaaggcaacgaagctagaaatggcagcgtgccaaggattggtaaattcttcatactcaatcccatatttttcctctaccagagccttgagtggatttttaagaaagatcttattggtcaagagttgggcagaagttttgaattctccattttggatataagcagcatagagggattttttggctagttccctatcttggtctagcaagagtttttctcgcgaaacggcagcttcctcggtatcttttggagttgaaacggatacatattctccaccagccattgaaaaggcaccagctaagatagccgtaaaacctgataaaaagataatccagatattggtcgtggcactggcaactccgataaccacaccagcaatggaaataattccatcgttagcatcaagaacacccgcacgcaggatatttaaacgacctgcaaaatttgaatcaatttcgtgatttgtttctgacgctaaatttcaagttcaagttagccatcaagaagtcttctctgggtgacttgtagtccaagcattttttaggatagttgttaatccacttttcgatgaatgcgacttctttgggagtcattttcttggttcccttaggtaaccatctacgaatgagcctgttgtgattctcattagttcccctttcccaagaggcatagggatgtgcataataaatgtgctcctcagaaaatacattagacaagcgattgaattccgttccattatctgccgtgatggaaagaatcttgtgttgttttaagatgagttttagagcctgattgaccacatcagcacttttatttggaatcaatcggatgatctgatgtctactttttcgatccgtcaagacaagcaagcagtagtttttcgctctcgtaagtagaactgtatcaatctcataatgcccattctccaagcgaaaattgatagcttcaagccgctgttcgatggattgaccagcaggtttaaagttggtgctggcctgtttcttaagcgcttttccttttctagggtaaagcagatcctgtttgcttaaccccaattttccatgatgaatccaatagtaaatggttgaaattcccacgttaacccctttagccatcaccatcatttcaggcgaaaatttttggttatgatagtggagaatcttttcctttagttccttggtcaagcttgatttcttgaccgagcgcttgcgattgttttcataagactgttgagcatagtcggcagaataaacctctttgaagcgcccttttccaagacattgtcggactgtcccacgcttgatttcagtgtggatagtttgaggaacttttccaagcagagaggcaatttctctatttgatttcccttcttttttccatctttcgattaagcgacggctatcgattgtcaaatgttcgccttttgtagtataatggttttgcatctctgtgcctttcttgtgtttgtggttgaacaacaagtataacacagaggtgttttcttatgcctacaagagctatcggctagttgaaccatctaatttttaggagggctgggtggctaacttcattatagaactttcatttacgaacatatagtaaaatgaaacaagaacagaacaaatcgatcaggacagtaaaatctatttctaacaatgttttagaagcagaggtgtactattctagtttcaatctattatatttttgttttttatcaaaaaatactttacaagttcttaaaaacatgatatagtaataaagcttagaaaatgagatgatgttttctagcaaatataaacccgagtaaaaaatgcctacggacaggcagggttgaatgccgaagcgtggttgaaaagccacattattgatagggttaaaagcctacttttataagttgatgttaggacacttgtcctaattcataaatttttagtgtggtgaaagcacacgtcatcttgtgaaacgatcaataaagtacgtaatatttgctactagagagttaggaaacatcgggaacagacatactcaacagaaaccaaaataaacacgtcagaagattgcagagcaggtgaaaacctgctcttttttcatgagtcaacctttagttccttagttttcataaggtcctaaaaatattgaaaggagtatgttttgaaagagttagatcaaaaccaagccccaatttatgaggccttggtgaagttacgcaagaaaaggattgttccctttgatgttccaggtcacaagcgtggacggggaaatccagaacttgtcgaactcttaggagaaaaatgtgtaggcattgatgtcaattcgatgaaacctttggataatttaggccatcctatttcgattattcgtgatgcagaggagctggctgcagatgcttttggagctagccatgcctttctaatgattggtggaacaacttcatcggtgcagactatgattctggcaacctgcaaggcaggagataagattattctgccacgaaatgtccataaatctgctatcaatgcgttggttctatgtggtgccattcccatctatatcgagatgagtgtagatcctaagattggtatcgctttaggtcttgaaaatgaccgagtagcacaggccataaaggaccatccagatgctaaggctatcctaatcaacaatcctacttactacggcatctgttcagacctaaaggggttgacagaaatggctcatgaagctggcatgatggttttagtagatgaagcccacggagcgcatttgcatttcactgataaacttccaatttctgctatggatgcaggggctgatatggcagcagtttccatgcataagtctggtgggagtttgacccaaagctccattttacttatcggggagcagatgaattctgaatacgttcgtcagataattaacctgacccagtctacatctgcctcttacttgttgatggctagtttggatatttcacgtcgcaacttggcccttcgtggtaaagagtcgtttgagaaagtcattgagctatctgagtatgcccgccgtgaaatcaatgctatcggtggctactatgcctactcaaaagagttaatagacggtgtttcggtttgcgattttgacgtaactaagctgtcagtttacactcagggtattggcttaacaggtatcgaggtttatgacctcttgcgagacgaatacgacattcagatcgagtttggtgatatcggcaatatcttggcctatatttccatcggcgaccgcatccaagacatcgagcgcttggttggtgctctggctgatattaagagactctattcaagagatggaaaagatttgatagcaggagaatatattcagcccgagttagtgctgtctccgcaagaagccttctattcagaaagaaaaagtttaactttggatgattctgttggacaggtctgtggagaatttgttatgtgttaccctccaggtattcctatcttggctcctggtgaacgcattacacgagaaattgtcgactatatccaattcgccaaggaacgtggttgctccctccaagggacggaagatccagaggtcaatcatatcaacgttattaagagaaagacaaactataagaaaagtcaatagttttatctaaactatttcttatttcaatttgatgatttggcgatgattttagagcacggcaaaaagcccttgaattagaagcggtcaatcgcttaatttctatcagcttatcaaatcctgcctcaagccttttctgaggattagggtagcgtgtcaagagttggtaggtatattctgaatgctttccaacgattttatccaactcaggaaagatgatatcaagacaacgagtgtattgtactttccaatcagactgttttttcttgagacgatgaatatgtctagccagtatttttagttctacttgccgattatcgtgttgaaattgttcacgattggggtcagaaagaagtttaagagcgatgccatgagcgtctttcttatccgttttagttttgcgaagtgataatgatttggcaaatttcttgatgagcaaaggattgtaggtgtaaactttatatccttgttcatgcaggaagttcagtagattaaaggcataatgtccggtattttcaagagcgatgagacagtcttggttgagctgtcgaagagacagatctaagagttcaaaaccagctttattatttgaaaaagtgagtggtttaagaacagtttttcctggaacattcaaggctgtaacatcgtgtttatttttagcgacatcaatgcccacataaagcatgggagtatctccagatatagtatttcaagtctactgggttatccacgaactttttgccttgttaccttagacgagataaaacgtctatgcgttatcaaactcattaccaattgaaacaaaaaactgtggttagagcctttcggaaatcgtcaagcgattggaggaaatgaactaatccacagtggcttattccaagtataccacttgggctttggcagtagctaactgcgctaaatataatataaggagaaatagatggatttatggttttctgaagttcatactccagatgtcaaattgtctctgagaacagccaagcaactttacgctggaaaaagtgaatggcaggatatcgaagtcttggatacgccagcttttgggaaaatactgattttaaatggccatgtcttgttctcagatgcggatgatttcgtctacaatgaaatgaccgttcacgttcccatggctgtccacccaaatccaaagaaagtattggttattgggggtggtgacggcggtgttgcccaagtattaaccctctatcctgaactggagcaaattgatattgtggaaccggatgagatgttggtcgaggtctgtcgtgagtatttcccagactttgctgcagggctagatgatcctcgtgttaccatttactaccaaaatgggctacgctttttgcgaaactgcgaagatgattacgatattatcatcaacgatgcgacagatccatttggccatacggaaggactctttaccaaggaattctacggcaatagttatcgagctctgaaggaagacggcatcatgatttaccagcatgggagtcccttctttgacgaggatgagtcggcctgccgaagcatgcaccgcaaggtcaatcaagcctttccaatcagtcgggtttatcaggcccatattccaactagcccagctggctattggttgtttggatttgcatcgaaaaaataccaccctgtcaaagattttgacaaggaaggctggaaaaaacgccagcttttcacagaatactacactgcaaacttacacgtgggagcctttatgttgcccaagtatgttgaggacattttagaagaagaggaaggaaaaaaatgagtcgtttactagttattggttgtgggggcgttgcccaagttgctatttcaaagatttgtcaagatagcgaaacatttacagagattatgattgctagccgtaccaagtcaaaatgcgatgacttgaaagcgaagctagaaggcaaaacaagtactaaaattgaaactgcagcacttgatgctgacaaggttgaagaagtgattgccctgattgaaagctacaaaccagaagctgttttgaatgtagctctgccttatcaagatttaaccattatggatgcttgtttggcaacaggtgttcactatatcgatacagccaactacgaagcagaagacacagaagaccctgagtggcgtgctatctacgaaaaacgttgtaaggaacttggttttacagcctactttgactactcatggcagtgggcttatcaagagaaattcaaagaagcaggcttgactgctcttcttggttctggttttgacccaggtgtaactagtgtcttttcagcttatgccctcaaacactattttgatgaaatccattatatcgacattttagactgtaatggcggtgaccacggttatccatttgcaaccaactttaatccagaaattaatctccgtgaggtttctgcgccaggttcttactgggaagatgggaaatgggtcgaagtcgaagctatgtctatcaagcgtgagtatgatttccctcaagttggacaaaaagatatgtatctccttcaccatgaagaaatcgaatcattggccaagaacattccaggtgtcaaacgcattcgtttctttatgacttttggtcaatcttacttgacgcacatgaaatgtcttgaaaatgttggactccttcgtacggataccattaactttaacggccaagaaattgttccaattcaatttttgaaagccttgcttccagatcctgccagtcttgggccacgtacagtcggaaaaaccaatattggatgtatctttacaggtgtcaaagacggtgtcaaaaagactatctatatctacaatgtctgcgaccatcaggaatgttacgcagaggttggttcgcaagctatttcttatacgacaggagttccagccatgattgggacaaaattagtcatgaacggaacttggaaacaagctggagtgtataaccttgaggagttagatccagatccattcatggaagctttgaatgagtatggtttgccatgggttgtggttgaaaatccacaaatggtggactaatgaagttagaacaagtaccaacaccagcctatgttattgacttggccaagttagaagctaattgccgcattctacaatatgtacaagaagaggccggttgcaaggtcttgcttgcccagaaggcatattccctctacaaaacttatcccttgattagccagtatctatcaggtacgacagctagtggactctatgaggccaaattggcaagggaagaatttcctggtgaagtccatgtatttgcgcctgctttcaaggatgcagacttggaggaattgctagagataatggaccatatagtctttaactcagagagacagttgcgtaaacacggtccgcgttgtcgagaggctggtgtcagtgttggtttgcgcctcaaccctcagtgttcaactcaaggagatcacgcgctctatgacccttgtgcaccaggttctcgctttggagttactatagacaagattccgagtgatttgctagatttggttgacggacttcattttcataccctttgcgagcagggagcagatgatttacaaacaactttgaaagcagtagaagaacagtttggtccctacttacatgaggtaaaatggctcaatatgggtggtggtcatcatattacaagagaaggttacgatgtggatttgctgatttcagaaatcaagcgtatccgaaaaacttacaatcttgaaatctatatcgagcctggtgaagccattgcgcttaatgcgggttatttagcaactgaggtattagatattgtagaaaacggtatggaaatcttggttttagacgcctctgcgacctgccatatgcctgatgtacttgagatgccctatcgtccacctttgagaaatggctttgagtcacaggaaaaagcccatacctacagactttcttctaatacctgtctgacgggcgatgtgattggtgattatagttttgaaaatccagtccaaatcggagacagactttattttcaagacatggccatttattcttttgtcaaaaataatacctttaatggtattggattgccaagtctctatctcatggacgaacagggagactgtagcttactcaaagcttttggctatcaagactttaaagggagattatcatgatggacagtccaaaaaaattaggctatcacatgccagcagagtacgaaccccatcatggtaccctcatgatatggccgactcgaccaggatcatggccttttcaaggaaaggctgctaaaagagcatttactcagattatcgagaccatagcagaaggggaaagagtctatcttttggtggagcaggcctatctatctgaagcccaatcctatcttggagacaaggttgtttatttagacattcccaccaatgatgcctgggcgcgtgatactggcccaaccattctcgtcaatgataaaggtaagaaattagccgtggattgggccttcaatgcttggggaggcacctatgatggtctttatcaagattatgaagaggatgaccaagtagccagtcgttttgctgaggccttggaaaggcctgtctatgatgctaaaccttttgtactggaaggaggcgcaatccatagcgatggtcaaggaactattctcgtaactgaaagttgcttgcttagtcctggtcgcaatcctaacttgactaaagaggagattgaaaacacattattagaaagtcttggtgctgaaaaagttatttggcttccttatggtatttatcaggatgaaaccaatgaacacgtcgataatgttgctgcctttgttggtcctgctgagcttgttttggcttggacagatgacgaaaatgatccccagtatgccatgtcaaaagcagatctcgaactcttagaacaggaaacagatgcaaaaggttgtcacttcaccattcataaattgcctatccctgcagttcgacaagttgtgacagaagaagatttgccaggctacatctatgaagaaggagaagaaaagcgatacgcaggtgaacgactagcagcttcctacgtaaacttttatatcgccaacaaggctgtcttggttccacagtttgaggatgtaaacgaccaagtggccttagatatcctcagcaagtgtttcccagaccgtaaagttgtcggaataccagccagagatattctcttaggtggtggcaatatccactgtatcacccaacaaattccagaataggagaaaaagatgagaaatgtaagagttgcaaccattcagatgcaatgcgctaaggatgtggcaacaaatatccaaaccgcagagcgtttagtacgtcaggctgctgagcaaggagcccaaattattctcttgcccgagttgtttgaacatccctatttctgtcaggaacgtcagtatgactactaccagtatgcccaatctgtagcggaaaatactgccattcagcattttaaggtgattgctaaggaactacaagttgttttaccaatcagtttctatgaaaaagatggtaatgtcttgtataactctattgccgtcattgatgcagatggggaagtgctgggcgtttatcgaaagacccatataccagatgaccattattatcaagaaaaattctatttcacgcctggtaacactggtttcaaggtctggaatactcgctatgctaagattggtatcggtatctgttgggatcaatggttccctgaaacagcgcgctgtcttgcattgaatggtgctgaattgctcttttatcctacagctatcggttcagagccaattttggatacagatagttgtggtcactggcaacgtactatgcaagggcacgcagcagcgaatattgttccagtcatcgcagccaatcgttatggtttagaggaggttactcctagtgaggaaaatggcggacagagctccagtcttgacttctacggttcctcctttatgacggatgaaacaggagctattctagaacgagctgaaagacaagaagaagctgttctgttagctacttatgacctagacaagggagcaagtgaacgcctaaactggggcttgtttcgagatagaagaccagaaatgtatagacaaattacagattagtgtgggagaaatgagagattcattctgctagactaacttcttattagtaactataagatactatggcatctagtaaatcgatttttatgattcgctattcttgtctattgattagtccgtattttaaaatattagcaaaaaagcaaatagcagtaacttctgtctatttgcttttcttttttatagaatatatttctcaatagcacgcgcaacgccgtcttcttcgttgcttgaggtaacggcatccgcaagagatttgatataatcgctggcatttcccattgcaatcccaagccctgcaaactggagcatttcgatatcgttattagcatcgcccatggccataatctctgaggaatcaatcttcaaaatctcagctagtcgtgaaagagcagtagcctttgtcgttccaagcggcattgcttcataaatgacaggctgcgaacgaactccactgaatcgttggcaaagctcttcagcaaaacgctgctcaaaatcgtctgtttgttcttttgttcctaaaaacataccttggaacatccggaactttccactagtcgcttcttcaagagaaatttcagtcaggtctgaaaatactagtttagcatcattttcaataacttgattgggcttgtcaccgagaacaaaataatgtgactcgtcaaaaagtgtcaactgaacatcactcttttcagcaaggtcatagaggtattcgatgtcagctggactcagttctttccagtcaactagactccaatcactggtctggtgagttgaacaaccgttgttaacaataatatattcgttctggaggtcaagctccagttttttgtagtaggggaggacaccgaaaagggggcgacccgtacagagaaccagtttgacacctttttcaatggctttgtgaatagcagtaatgtgagcttgtgggatttccttggcttcattgaggagggtgccgtccatatccaaggctagtagtttaatcataggtcttccttctttatcttttgctattattatagcatattttggagaagaaattgatagaaagcttgagactaattgattttatagtttaagatgttttgatgacaattcatgatttgaagaggatatttcgcaaagatatgctatactatgtttgtcaatgttgcaactagacaaattaaaaaaccaacttaatataatagtttttttgtaagtaggtatgagtagcagattactcaactaatctgaagaataatggaggaaatatatcatgattttaatgacaaaaaatataaatctaacaaatgaagaattagagctgatacaaggtggagcagatccatatggtaaaaatcctaatggtaggtacgattgggaaatagaaccagtattaactctgctggttcatggattttgtcccagaggcacctatgattcaggatatattggaggaggtaatcatctttgcaaaggaagtgctgcgagattttaagtaaaatttattaggaatatgaagaaacaaggggagaaaacagaggatttaatatgaaaaaacgagctattcaaattttactagcattgtccttaattttttacaaatcaacttggttttggaggcttttcaattatctcgcaaagccctatctaccagcaagtcgtgaattttttcagattctgcttttgatggagagcggagttcttttcttagcggtcatctatctactggtttttgcaggaaagaaaatttttcatttcaagtggcagctgaggtacttcatctaccttttactgggctacatcatttcatatatgtctgacttcctcttttcgtatttcatatccctgtcttcaaatcagatttctttgaatgaaacggtagaaatgatggggagacaggagttcccttatttcttgctcatcgtttgcttcatcgcccctattgctgaggaattgatttatcgaggtgtgcttatgacaacctttttcaaaaactcaccttggtacggagatgttttgctttctgctattattttcggttatattcatatcaattttgctttaactcctcttgcttttttcatttatgctagtggaggtcttattttagctctattgtatcgcatgactaaaaatctctactatccaatactagttcatattctcattaatatcactgccttctgggatgtgtggttgctcctattttcaggaagttagcttactaaaataatgtcggaactttccggcattttcttttttcacaaatagtcaacgtttttcttttcgatattgtagtggtgtgtatccagttatttttttgaattgattttgaaaataaggttgacttgagaaaggcagatagtgaagatagttaagaagaataggatgttcttttttcctttttggaaaacttctaaaatatggtataatgaaaagataaagaagttgggggtagaagatgaacattcaacaattacgctatgttgtggctattgccaatagtggtacttttcgtgaagctgctgaaaagatgtatgttagtcagccgagtctgtctatttctgttcgtgatttggaaaaagagttgggctttaagattttccgtcggaccagctcagggactttcttgacccgtcgtgggatggaattttatgaaaaatcgcaagaattggttaaaggatttgatatttttcaaaatcagtatgccaatcctgaagaagaaaaagatgaattttctgttgctagccagcactatgacttcttgccaccaactattacggccttttcagagcgctatcctgactataagaacttccgtatttttgaatcaactactgttcaaatattagatgaagtggcgcaagggcatagtgagattgggattatctacctcaacaatcaaaataaaaaggggattatgcaacgggttgaaaaattaggtctggaggtcatcgaattgattcctttccatacccatatttatctccgtgagggtcatcctttagcccagaaagaggaattagtcatggaggatttagcggatttaccaacggttcgtttcactcaagagaaagacgagtacctttattattcagagaactttgtcgataccagcgctagctcacagatgtttaatgtgacagaccgtgccaccttgaatggtattttggagcggacggacgcctatgcgacaggttctggatttttagatagtgacagtgttaatggcattacagttattcgtctcaaggataacctagataaccgcatggtctatgttaaacgtgaagaagtggagcttagtcaagctgggactctcttcgtagaagtcatgcaagaatattttgatcaaaagaggaaatcatgaaaaaaagagcaatagtggcagtcattgtactgcttttgattgggctggatcagttggtcaaatcctatatcgtccagcagattccactgggtgaagtgcgctcctggatccccaatttcgttagcttgacctacctgcaaaatcgaggtgcagccttttctatcttacaagatcagcagctgttattcgctgtcattactctggttgtcgtgataggtgccatttggtatttacataaacacatggaggactcattctggatggtcttgggtttgactctaataatcgcgggtggtcttggaaactttattgacagggtcagtcagggctttgttgtggatatgttccaccttgactttatcaactttgcaattttcaatgtggcagatagctatctgacggttggagtgattattttattgattgcaatgctaaaagaggaaataaatggaaattaaaattgaaactggtggtctgcgtttggataaggctttgtcagatttgtcagaattatcacgtagtctcgcgaatgaacaaattaaatcaggccaggtcttggtcaatggtcaagtcaagaaagctaaatacacagtccaagagggtgatgtcgtcacttaccatgtgccagaaccagaggtattagagtatgtggctgaggatcttccgctagaaatagtctaccaagatgaggatgtggctgtcgttaacaaacctcagggaatggttgtgcacccgagtgctggtcataccagtggaaccctagtaaatgccctcatgtatcatattaaggacttgtcgggtatcaatggggttctgcgtccagggattgttcaccgtattgataaggatacgtcaggtcttctcatgattgctaaaaacgatgatgcgcatctagcacttgcccaagaactcaaggataaaaagtctctccgcaaatattgggcgattgttcatggaaatctacctaatgatcgtggtgtaattgaagcgccgattggccggagtgaaaaagaccgtaagaaacaggctgtaactgctaaagggaagcctgcagtgacgcgttttcacgtcttggaacgctttggcgattatagcttagtagagttgcaactggagacagggcgcactcatcaaatccgtgtccacatggcttatatcggccatccagtcgctggtgatgaggtctatggtcctcgcaagactttgaaaggacatggacaatttcttcatgccaagactttaggttttactcatccgagaacaggtaagaccttggaatttaaagcagatatcccagagatttttaaggaaaccttggagagattgagaaagtaagaatgaaaaagaaattaactagtttagcacttgtaggcgcttttttaggtttgtcatggtatgggaatgttcaggctcaagaaagttcaggaaataaaatccactttatcaatgttcaagaaggtggcagtgatgcgattattcttgaaagcaatggacattttgccatggtggatacaggagaagattatgatttcccagatggaagtgattctcgctatccatggagagaaggaattgaaacgtcttataagcatgttctaacagaccgtgtctttcgtcgtttgaaggaattgggtgtccaaaaacttgattttattttggtgacccatacccacagtgatcatattggaaatgttgatgaattactgtctacctatccagttgaccgagtctatcttaagaaatatagtgatagtcgtattactaattctgaacgtctatgggataatctgtatggctatgataaggttttacagactgctgcagaaaaaggtgtttcagttattcaaaatatcacacaaggggatgctcattttcagtttggggacatggatattcagctctataattatgaaaatgaaactgattcatcgggtgaattaaagaaaatttgggatgacaattccaattccttgattagcgtggtgaaagtcaatggcaagaaaatttaccttgggggcgatttagataatgttcatggagcagaagacaagtatggtcctctcattggaaaagttgatttgatgaagtttaatcatcaccatgataccaacaaatcaaataccaaggatttcattaaaaatttgagtccgagtttgattgttcaaacttcggatagtctaccttggaaaaatggtgttgatagtgagtatgttaattggctcaaagaacgaggaattgagagaatcaacgcagccagcaaagactatgatgcaacagtttttgatattcgaaaagacggttttgtcaatatttcaacatcctacaagccgattccaagttttcaagctggttggcataagagtgcatatgggaactggtggtatcaagcgcctgattctacaggagagtatgctgtcggttggaatgaaatcgaaggtgaatggtattactttaaccaaacgggtatcttgttacagaatcaatggaaaaaatggaacaatcattggttctatttgacagactctggtgcttctgctaaaaattggaagaaaatcgctggaatctggtattattttaacaaagaaaaccagatggaaattggttggattcaagataaagagcagtggtattatttggatgttgatggttctatgaagacaggatggcttcaatatatggggcaatggtattactttgctccatcaggggaaatgaaaatgggctgggtaaaagataaagaaacctggtactatatggattctactggtgtcatgaagacaggtgagatagaagttgctggtcaacattattatctggaagattcaggagctatgaagcaaggctggcataaaaaggcaaatgattggtatttctacaagacagacggttcacgagctgtgggttggatcaaggacaaggataaatggtacttcttgaaagaaaatggtcaattacttgtgaacggtaagacaccagaaggttatactgtggattcaagtggtgcctggttagtggatgtttcgatcgagaaatctgctacaattaaaactacaagtcattcagaaataaaagaatccaaagaagtagtgaaaaaggatcttgaaaataaagaaacgagtcaacatgaaagtgttacaaatttttcaactagtcaagatttgacatcctcaacttcacaaagctctgaaacgagtgtaaacaaatcggaatcagaacagtagtagaaaagaaggttttagggccttctttttcctatcaactcttttctatttcctgttattcatgttataatggataaatatgaataatcggagtgagactatgaaatacaaacggattgtctttaaggtgggtacttcttctctgacaaatgaggatggaagtttatcacgtagtaaggtaaaggatattacccagcagttggctatgctgcacgaggctggtcatgagttgattttggtgtcttcaggtgccattgcggctggttttggagccttaggatttaaaaagcgtccgactaagattgctgataaacaggcttcagcagcggtagggcaggggcttttgttggaagaatatacaaccaatcttctcttgcgtcaaatcgtttctgcacaaatcttgctgacccaagatgactttgtggataagcgtcgttataaaaatgcccatcaggctttgtcggttttgctcaaccgtggggcaattcctatcatcaatgagaatgatagtgtcgttattgatgagctcaaggttggggacaatgacactctaagtgctcaagtagcggcgatggtccaagcagaccttttagttttcttgacagatgtggacggtctctatactggaaatcctaattcagatccaagagccaaacgcttggagagaatcgagaccatcaatcgtgagattattgatatggctggtggagctggttcgtcaaacggaactgggggtatgttaaccaaaatcaaggctgcaactatcgcgacggaatcaggagttcctgtttatatctgctcatccttgaaatcagattccatgattgaggcggcagaggagaccgaggatggttcttactttgttgctcaagagaaggggcttcgtacccagaaacaatggcttgccttctatgctcagagtcaaggttctatttgggttgataaaggggctgcggaagctctctctcaatatggaaagagtcttctcttatctggtatcgttgaagcagaaggagtcttttcttacggtgatatcgtgacagtatttgacaaggaaagtggaaaatcacttggaaaaggacgcgtgcaatttggagcatctgctttggaggatatgttgcgttctcaaaaagccaagggtgtcttgatttaccgtgacgactggatttccattactcctgaaatccaactactttttacagaattttagaggtaaactatggtgagtagacaagaacaatttgaacaggtacaggctgttaaaaaatcgattaacacagctagtgaagaagtgaaaaaccaagccttgctagccatggctgatcacttagtggctgctactgaggaaattttagcggctaatgccctcgatatggcagcggctaaggggaaaatctcagatgtgatgttggatcgtctttatttggatgcagatcgtatagaagcgatggcaagaggaattcgtgaagtggttgccttaccagatccaatcggtgaagttttagaaacaagtcagcttgaaaatggtttggttatcacaaaaaaacgtgtagctatgggtgtcatcggtattatctatgaaagccgtccaaatgtgacgtctgatgcggctgctttgactcttaagagtggaaatgcggttgttcttcgtagtggtaaggatgcctatcaaacaacccatgccattgtcacagccttgaagaagggcttggagacgactactattcatccaaatgtgattcaactggtggaggatactagccgtgaaagtagttatgctatgatgaaggccaagggctatctagaccttctcattcctcgtggaggagctggcttgatcaatgcagtggttgagaatgcgattgtacctgttatcgagacagggactgggattgtccatgtctatgtggataaggatgcagacgaagacaaggcgctgtctatcatcaacaatgctaaaaccagtcgtccttctgtttgtaatgccatggaggttctgctggttcatgaaaacaaggcagcaagcttccttcctcgcttggagcaagtgttggttgcagagcgtaaggaagctggactggaaccaattcaattccgcctagatagcaaagcaagccagtttgtttcaggtcaagcagctgagacccaagactttgacaccgagtttttagactatgtccttgctgttaaggttgtgagcagtttagaagaagcggttgcgcacattgaatcccacagcacccatcattcggatgctattgtgacggaaaatgctgaagctgcagcatactttacagatcaagtggactctgcagcggtgtatgttaatgcctcaactcgtttcacagatggaggacaatttggtcttggttgtgaaatggggatttctactcagaaattgcacgcgcgtggtcccatgggcttgaaagagttgaccagctacaagtatgtggttgccggtgatgggcagataagggagtaagagatgaagattggatttatcggtttggggaatatgggtgctagcttggcaaaatctgtcttgcagactaggacgtcagatgagattctccttgccaatcgtagtcaagctaaggtagatgctttcattgcagactttggtggtcaggcttccagcaatgaagaaatgtttgcagaagcagatgtgatttttctaggagttaagcctgctcagttttctgaactgctttctcaataccagaccatccttgaaaaaagagaaagtcttcttttgatttcgatggcagctggattgaccttagaaaaactagcaagtcttatcccaagtcaacaccgaattattcgtatgatgcctaatacccctgcttctatcgggcaaggagtgattagttatgccttgtctcctaattgcagggctgaggacagtgagctcttttatcagcttttagccaaggctggtctcttggttgaactaggagaaagtttaatcgatgcagcgacaggtcttgcaggttgtggaccagcctttgtctatctttttatcgaggccttggcagatgcaggtgttcagacaggattaccacgagaaatagcattgaaaatggcagcacaaactgtggtaggagctgggcaattggtccttgaaagtcagcaacatcctggagtattgaaagaccaagtctgtagcccaggcggttcgactatcgctggtgtagcaagcctagaagcgcatgctttccgaggaacagtcatggatgcagttcatcaagcctacaaacgaacacaagaactaggtaaataagaggtagttttgactgcctcttttatggtggctgaaatgagaagacacaaaaagattgtcacaaacccctatttttttgatagaatagaagtagtaaaaaagaaatgagttagacatgtcaaaaggatttttagtctctcttgagggaccagagggagcaggcaagaccagtgttttagaggctctgctaccaattttagaggaaaaaggagtagaggtgttgacgacccgtgaacctggcggagtcttgattggggagaagattcgggaagtgattttggatccaagtcatactcagatggatgctaaaacagagctacttctctatattgccagtcgcagacagcatttggtggaaaaagttcttccagcccttgaagctggcaagttggtcatcatggatcgttttatcgatagttctgttgcctatcagggatttggtcgtggcttagatattgaagccattgactggctcaatcagtttgcgacagatggcctcaaacccgatttgacactctattttgacatcgaggtggaagaagggctggctcgtattgctgctaatagtgaccgcgaggttaatcgtttggatttggaagggttggacttgcataaaaaagttcgtcaaggctacctttctcttctggataaagagggaaatcgcattgtcaagattgatgctagtctccctttggagcaagttgtggaaactaccaaggctgtcttgtttgacggaatgggcttggccaaatgaaacaagatcaactaaaggcttggcaaccagctcagtttgaccgttttgtccgtatcttagaacaagaccagctcaatcacgcctatctcttttcaggtttctttgaaagcttggaaatggcgcaatttttagctaagagcctcttttgtacggataaagttggcgtcttaccatgtgagaaatgccgaagttgcaagctgattgaacagggagaatttcccgatgtcaccttgattaaaccagttaatcaggtcattaagacggaacgcattcgagaattggtgggtcagttttctcaagcagggattgaaagccagcaacaggtctttatcatcgagcaagcggataaaatgcatcccaacgcagccaattctctgctcaaggtcatcgaagaaccccagagtgaagtttatattttcttcttgactagcgatgaggaaaagatgttaccgacaatccgaagtcggactcagatcttccactttaaaaagcaagaagaaaaacttatcttactcttagaacaaatgggacttgttaagaaaaaagcgactcttttagctaagtttagtcaatcgcgagctgaagcagaaaagttggctaatcaggcaagtttttggaccttggtcgatgaaagtgaacgcctgctgacttggttagtagctaagaaaaaagaaagttatctacaggttgccaaattagccaacttggcagatgataaggaaaaacaggatcaggttttacggattcttgaagttctctgtgggcaggacctcttgcaggtaagagtaagagtgattctacaagatttactagaagctagaaaaatgtggcaagctaatgtcagctttcaaaatgccatggaatatctggtcttgaaagaaatataaactcaaaaatgaatgataaagaaaggaaagggctgttttatggacaaaaaagaattatttgacgcgctggatgatttttcccaacaattattggtaaccttagccgatgtggaagccatcaagaaaaatctcaagagcctggtagaggaaaatacagctcttcgcttggaaaatagtaagttgcgagaacgcttgggtgaggtggaagcagatgctcctgtcaaggccaagcatgttcgtgaaagtgtccgtcgcatttaccgtgatggatttcacgtatgtaatgatttttatggacaacgtcgagagcaggacgaggaatgtatgttttgtgacgagttgctatacagggagtaggcatgcagattcaaaaaagttttaaggggcagtctccctatggcaagctgtatctagtggcaacgccgattggcaatctagatgatatgacttttcgtgctatccagaccttgaaagaagtggactggattgctgctgaggatacgcgcaatacagggcttttgctcaagcattttgacatttccaccaagcagatcagttttcatgagcacaatgccaaggaaaaaattcctgatttgattggtttcttgaaagcagggcaaagtattgctcaggtctctgatgccggtttgcctagcatttcagaccctggtcatgatttagttaaggcagctattgaggaagaaattgcagttgtgacagttccaggtgcctctgcaggaatttctgccttgattgccagtggtttagcgccacagccacatatcttttacggttttttaccgagaaaatcaggtcagcagaagcaattttttggcttgaaaaaagattatcctgaaacacagattttttatgaatcacctcatcgtgtagcagacacgttggaaaatatgttagaagtctacggtgaccgctccgttgtcttggtcagggaattgaccaaaatctatgaagaataccaacgaggtactatctctgagttattagaaagcattgctgaaacgccactcaagggcgaatgtcttctcattgttgagggtgccagtcagggtgtggaggaaaaggacgaggaagacttgttcgtagaaattcaaacccgcatccagcaaggtgtgaagaaaaaccaagctatcaaggaagtcgctaagatttaccagtggaataaaagtcagctctacgctgcctaccacgactgggaagaaaaacaataaagggagacaggatgtaataattctgtctgtttctgtttaacttaattagtgatgataatataaagatgtatcacttggtatagaagctttggtattaagttttttattaagcccatacggaataccgatggttggagcagcagttatagcgttcttagaaggtataaatagaaaaataaggtcattttaaatcaaaggattgataaatcagaaagaaggtgattttttgcgaacatacgaaaataaagaagaactaaaagctgagatagagaaaacatttgagaaatatattttagaatttgataatattccagaaaatttaaaagataagagagctgatgaagttgacagaactccagcagaaaaccttgcttatcaggttggttggaccaacttggttcttaaatgggaagaagatgaaagaaaggggcttcaagtaaaaacaccatcggataaatttaaatggaatcaacttggtgaattatatcagtggttcacagatacctacgctcatttatctctgcaagagttgaaagcaaaattaaatgaaaatattaattctatctctgcaatgattgattcgttgagtgaggaagaattatttgaaccgcatatgagaaagtgggctgatgaagcgactaaaacagcgacttgggaagtgtataagtttattcatgtaaatacggttgcaccttttggaactttcagaactaaaatcagaaaatggaagaagatagtattataaattatatttttaactttaaaaaatttcataaaaatggttaccaaaggcgatagaagaaaaactatcgtctttttctttgcaaatttttaagaagggaggtgatcttgcatggactttgaatatttttataacagagaagcggaaagatttaacttcttaaaagtaccggagatattagttgatagagaagaatttcggggcttatcagcagaagcaattatcctttattccatacttcttaaacagacaggaatgtcatttaagaataactggatagacaaggaaggcagagtatttatctattttactgtcgaagaaattatgaaaagaagaaatatctcaaagccaactgccataaaaacattagatgagcttgatgtaaaaaaggaataggactgatcgaaagagtaaggcttggacttggtaagccgaacatcatttatgttaaagactttatgagtatatttcaggtaaaagaaaatgacttacagaagtcaaaaaacttaacttcagaagtaaaagattttaacctcagaagtaaagaaaatgaacttcaagaggttaagaaccttgactctaactatatagagaataataagagtaagtatagtaagagagaatatagttttggtgaaaacggacttggaacatttcaaaatgtgtttttagctgctgaagatatatcggatttacaaatcataatgaactcacagcttgagaattacattagacttcctgcaaaactagaatcctagttcatgattgataatgccagcaatcaaattcattcgtaatccgaagcgtttacgatgatttcgatagattgttgaaaacattttaaacgtttttactttggcaaagatgttctcaatcttgcttctctccttggatagcgcatggttacaggctttatcttcagctgttagcggcttgagtttgctggatttacgtggagtttgtacttgaggatatatcttcatgagcccttgataaccactgtcagacaagattttaccagcttgtccgatatttctgcgactcattttgaacaacttcatatcacgacaatagttcacagcgatatccaaagaaacaattctcccttgacttgtgacaatcgcttgagccttcatagcgtgaaatttctttttaccagaatgattcgctaattctttttttagggcgattgatttttacttccgtcgcatcaatcattaccgtgtcctcagaactgagaggagttcttgaaatcgtaacaccactttgaacaagagttacttcaacccattggctccgacggattaagttgctttcgtgaataccaaaatcagccgcaatttgttcataagttcgatattctcgcacatattgaagagtggccataagaaggtcttctaggcttaatttaggttttcgtccaccttttgcgtgtttaagttgataagctgtttttaatacagctaatatctcttcaaaagtcgtgcgctgaacaccaacaagacgcttaaatcgtgcatcagttagttgtttacttgcttcatcattcatagaactactataccatattttgtttcgcaggaagtctattggaaagtaagaaatattgaagctgaggctattagaagaaattgtgagcgtggtgctattttttcaggtaaaataaaatatcacgaagattcacagtttaaaggagatcactatgttgaatgttatgctgttttagataatacggttatagcaagagatagaataacagtccctatcgatccgttatgtggaaaagattttatagagtagcatataattgattcttaactggaatactcactatctctttacatcaagaaaatgactaaacagggaagtttgccttcttccctttttttgttatactagtagaagaaaaaattagaaagatttgtgggtgtcaaacagcccagtggggtgttttaatatggacttaggtcccacccaaagaggtattagtgtcgtgtctcaatcttatatcaatgttatcggtgctggtttggcaggttctgaagcagcttaccaaatcgcagagcgtggtattccagttaaactatatgaaatgcgtggtgtcaagtctacaccccagcataaaacagacaattttgctgagttggtttgttccaattctttgcgtggggatgctttgacaaatgcagttggtcttctcaaggaagaaatgcgtcgcttgggttctgttatcttggaatctgctgaggctacacgtgttcctgcaggtggtgcccttgcagtggaccgtgatggtttctctcaaatggtgaccgaaaaagttgccaaccaccccttgattgaagtggttcgtgatgaaattacagaattgccgacagatgttattacggttatcgctactggtcctttgacaagtgatgccttggctgaaaagattcatgctcttaatgacggtgctggtttttatttctacgatgcggcagcgcctattatcgatgtcaacactatcgatatgagcaaggtctacctcaaatcacgttatgataagggagaagcggcctacctcaatgcccctatgaccaagcaagaatttatggatttccatgaagctttggtcaatgcagaagaagcaccgcttagttcttttgaaaaagaaaagtactttgaaggatgtatgcctatcgaagtcatggccaaacgtggcattaaaactatgctttatggccctatgaagccagtcggtcttgagtacccagacgactatacaggacctcgtgatggagaatttaaaacaccttatgcggttgtgcaacttcgtcaggataatgcagctggtagcctctacaatattgttggtttccagacccacctcaaatggggagaacaaaagcgtgtcttccaaatgattccgggtcttgaaaatgcggagtttgtccgttatggtgtgatgcatcgcaattcttacatggattcaccaaatcttcttgagcagacttaccgttctaagaaacaaccaaatctcttctttgctggtcaaatgacgggtgtggaaggctatgttgagtcggcggcttcaggcttagttgcgggaattaacgcagctcgtctcttcaaggaagaaagcgaggctattttccccgagacgacagcgattggaagcttagctcattacattacccatgccgacagcaaacatttccaaccaatgaatgtcaattttgggatcatcaaggagttggaaggcgagcgtatccgtgataagaaggctcgttatgaaaaaattgcagagcgtgcccttgccgacttagaggaatttttgactgtctaatttttttgaaagaattgctcatgatactataaaaatcttagaaattgtgataaaataggtaggatgaaagaaggagagtgaaaatggcgaatcccaagtataaacgtattttaatcaagttatcaggtgaagcccttgccggtgaacgtggcgtagggattgatatccaaacagttcaaacaatcgcaaaagagattcaagaagttcatagcttaggtatcgaaattgcccttgttatcggtggaggaaatctctggcgtggagaacctgcagcagaagcaggtatggaccgtgttcaggcagattacacaggaatgcttgggactgttatgaatgctcttgtgatggcagattcattgcaacaagttggggttgatacgcgtgtacaaacagctattgccatgcaacaagtggcagagccttatgtccgtggacgtgcccttcgtcaccttgaaaaaggccgtatcgttatctttggtgctggaattggttcaccttacttctcgacagatacaacagcggcccttcgtgcagctgaaatcgaagcagatgccatcctcatggctaaaaatggtgtcgatggtgtttacaatgccgatcctaagaaagataagacagctgttaagtttgaagaattgacccaccgtgacgttatcaataaaggtcttcgtatcatggactcaacagcttcaaccctctcaatggacaacgacattgacttggttgtattcaacatgaaccaaccaggcaacatcaaacgtgtcgtatttggtgaaaatatcggaacaacagtttcaaataatatcgaagaaaaggaataagaaagaatatggctaacgcaattattgaaaaagctaaagagagaatgacccagtctcaccaatcacttgctcgtgaatttggtggtatccgtgctggtcgtgccaatgcaagcttgcttgaccgtgtacatgtagaatactatggagtcgaaactcctcttaaccaaatcgcttcaattacgattccagaagcgcgtgttttgttggtaacaccatttgacaagtcttcattgaaagacatcgaacgtgccttgaacgcttctgatattggtatcacaccggctaatgacggttctgtgattcgcttggttatcccagctcttacagaagaaactcgtcgtgaccttgctaaagaagtgaagaaggtcggcgaaaatgctaaagtggctgtccgcaatatccgtcgcgatgctatggacgaagctaagaaacgagaaaaagcaaaagaaatcactgaagacgaattgaagactcttgaaaaagacattcaaaaagtaacagacgatgctgttaaacacatcgacgacatgactgctaacaaagagaaagaacttttggaagtctaaaaataaacagaaaaactcagttggcattgctggctgagttttattcgaaagaaggaaatatgaatacaaatcttgcaagttttatcgttggactgatcatcgatgaaaacgaccgtttttactttgtgcaaaaggatggtcaaacctatgctcttgctaaggaagaaggccaacatacagtaggggatacggtcaaaggttttgcatacacggatatgaagcaaaaactccgcctgacaaccttagaagtgactgccactcaggaccaatttggttggggacgtgtcacagaggttcgtaaggacttgggtgtctttgtggatacaggccttcctgacaaggaaatcgttgtgtcactcgatattctccctgagctcaaggaactctggcctaagaagggcgaccaactctacatccgtcttgaagtggataagaaagaccgtatctggggcctcttggcttatcaagaagacttccaacgtcttgctcgtcctgcctacaacaacatgcagaaccaaaactggccagccattgtttaccgtctcaagctgtcaggaacttttgtttacctaccagaaaataatatgcttggttttattcatcctagcgagcgttacgcagagccacgtttggggcaagtattagatgcgcgcgttattggtttccgtgaagtggaccgcactctgaacctctccctcaaaccacgctcctttgaaatgttggaaaacgatgctcagatgattttgacttatttggaaagcaatggcggtttcatgaccttaaatgacaagtcatctccagacgacatcaaggcaacctttggcatttctaaaggtcagttcaagaaagctttaggtggtcttatgaaggctggtaaaatcaagcaggaccagtttgggacagagttgatttagggaggcttatgagaaaatcattttacacttggctcatgaccgagcgcaatcctaaaagtaacagtcccaaagcaattttggcagacctcgcttttgaagagtcagcctttccaaaacacacagatgattttgatgaggtcagtcgctttttggaggagcatgccagtttctcttttaacctaggagattttgacagcatttggcaggaatatctagaacactagcatttattcattgggtttgggctagtaatttctccatccctctgctataataaaaagaaataaaaggattagagaggttctttatttgaaggaacattcaatagacattcaactgagtcatccagatgacctgtttcatctttttggttccaatgaacgccatcttcgtttgatggaagaagagcttgatgttgtgattcatgctcgtacggagattgtccaggttttgggagaagagtctgcctgtgaggaagcccgtcaagttattcaggctttgatggtcttggtaaatcgtgggatgaccgttggtacgccagatgtagtcactgcgattagcatggtcaaaaatgatgaaattgacaagtttgtcgccctttacgaagaagaaattatcaaggataatactgggaaacctatccgtgtcaaaaccctagggcaaaagctttatgtggacagtgtcaaacagcatgatgtgacctttggaattgggccagcaggtacagggaagaccttccttgcagtgaccttggcagtgactgcccttaaacgtgggcaagtcaagcgaattatcctaactcgtccagcggtggaagcgggagagagtcttggatttcttccgggtgatcttaaggagaaggtggatccttaccttcgtcctgtttacgatgccttgtatcaaattcttgggaaagaccaaacgactcgtctcatggagcgtgaaattatcgaaattgcgccccttgcctatatgcgtggccggaccttggatgatgcctttgtcattctcgatgaggcgcaaaacacgaccatcatgcagatgaagatgttcttgacgcgtttaggttttcattctaagatgattgtcaatggagatattagtcagattgacctgccacgtaatgtcaagtccggtttgattgatgctcaagagaaactcaagaacatccatcagattgactttgttcatttttcagccaaggatgtggttcgccatcctgttgtcgctcagattatccgagcctatgaatattctactgaagttgcacacgactgattttgaggaagttcgcctgcaaaagaatagacttgttcggtaactgtaaaaagtgttatactatttttatggaaacagtatacgacaaagcacaaaaacttaactcaaaaaacttcaaactattgattggtgtcaaaaaggaaacctttcaactcatgctagaacacctgaattcagcctatcagattcagcaccgaaaaggtggacgtccacgtagtctgcccatggaagaccagctcattatgaccctccgttacttgcgatattatcccactcagcgtctgctggcctttgattttggcgtcggtgtagctacggtaaatgccatcatcacttgggtggaggatacacttcgtgcgtcaggtagctttgatttggaccatttagaagccccgagtgctgctgtggctattgacgtgaccgaaagtccgattcagcgtccaaacaaaaccaaagcaaaaattattctggtaaaaagaaacgacacaccttaaaaactcaaattatgctggatttgacgacacataaagtctgtcaaatggccttttctgacggacatacgcatgattttactctcttcaaagaaagtattggacaaagtttgcctgaaacgacgcttgcctttgttgacctaggttatttaggcatcttgaaatttcatgagaatactttcattcctgctaaaaattccaaaaatcgccgcctgagtgaggatgataagcagttaaataaagagatgtcagcgatacgaattgaaattgaacattttaacgctaaattcaagaccttccaaatcatgtcagtcccttatcgtaaccgcagaaaacgtttcgagttacgggcggaattaatttgtgccatcatcaattatgaagtgaactagattccgaacaagtctaatatacttttgagagaggaaaatccagttgtataggctaaaggttttatccaaaggtctgagacaacgattaggcacgatggaaagaacttttatgtggctgatgacgatcagtgcatcttcctgtgtcataatcacagggcacaagaaagtaggaatttgaaaagatgattgaccaactatctaagtattacagttgtaggatactaactgaaaaggatattccaagtattttatctttatatgaaagtaatcctctgtattttcagcattgtccaccagagccaaattttgcaactgtaaaagaggacatgctttgtctacctgaaggtaaagctaaggctgataagttttttgttggattttggaatggatctgaccttgtggctgttatggattttgtctatgcatatcctgatgaggagactgtttttattggtttgtttatggttgatcaagcctatcagagaaaagggattggtagtcatattgtgacagaagcactagcttattttgctaagaactttcgaaaggcacgtttggcttatgttaagggaaatccgcaatctcagcatttttgggaaaagcagggctttaaatcaattggatgcgaggttaagcaagaactctatacggttgttatcgctgaacagagcctagaagattagaaatggcatcaagtaagaactatttggaatttgttttggaacaattatcaggattagatgatgtgacttaccgttccatgatgggggagtatattctttacttccgcggcaagattattggcggcatttatgacgatcgctttttagttaaacccgtgcaagcagtcttagataagattgaccaatcttcttttgagtttccatacaaaggtgccaaagaaatgatttgagtggaagaacttgataataagatgtttctataagacctaattttagctatgtataaccaactgccaacgcccaaacctaaaaagaaaaagcaagggtgaacgaagtaaaaaagaagtctgctaaggccctgtctttgcacgggtaaaattttatatataaaaagaagctgggactaaagagctcagcttcctttggtttatataattgtcattacaagacgaagtggttgggcgaaactctgttgactttattcaatttagagtttcttatgcacaattgagtctggaacgaaagtctccagttgcaaagtatacagtacaataaaccaacgatgtaatagctgatgacacaaagcacagtgggtaggacttgcgaagtcacccttttcttttcaaaatttatactaaatcattgatatcagtgtagtcacgattaagtccttgagcaactggtaggttagtcaagtaaccttgataagtagtcacaccttgacgcaagccttcatcttcagagattgcttgtgcgaatcctttgccagccaaagcttcgatataaggaagagtgacattggttagggcgatggttgaagtgcgagcaaccgcaccagggatattggcaacggcatagtggagaacaccgtgtttttcatagacgggttcatcgtgcgttgtcacacggtcagctgtttcgataacgccaccttggtcaacagcaacgtcaacgatacagagcctggacgcatttgtttgaccatctcatctgtcaccaattccggtgcttttgcaccagggatgagaatggctccaatcaccacatcagcatctctcacacttgcttcaatgttgaatgaattagacataagagtttgaatttgacttccaaagacttcttctagaactgagagacgcttggaactaatatctaaaatagtcacttgagcaccaagaccaagggcgatgcgggcagcatgtgtaccgacgacaccaccaccgatgatagttacttttccttttggaacacctggtacaccaccaagtagaacaccagagccaccagcttgcttagtaaggaagtgagctccgatttgaacagccatacgacctgcaacctcactcataggaacgaggagcggtagttgtccttgattgtcacgaacagtttcagttgtttttgctgttaacatagcatctgctaattctggagcagcggccatgtgcaagtaggtgaagagaagaagatcgtcgcgcaagtaaccgtattcagaacttaaagattcttttactttcacaaccaactctgctgcccaagcttcaccagcagtagcgacaatctcagctccttgcttttgatagtcagcatcagtaaagccagaaccgagaccagcatttgtttcgataaggacacgatgaccacgactaactaagctatgaacacctgcaggtgtgagggcgacacggttttcgttatttttaatttcttttgggattccgattaacattgagataacctacctttcaattgacggtcttgttttggttgtcacattccagttcataaatcaaaaatgtgacggtttcattgtatatgaaaccgcttcaaaaatcaagaaaaacttgtcatccaaatttttttatgctagactagtgaaaatcaagctctaatggagggaaaagtatggaatcaatatttgtgaaatttgcccagtatccgtctatagaaacggagcgtttattgctcagacctgtaactttggatgatgcggaagcaatgtttgactatgcctcggacaagggtaatacacgttacacttttccaaccaatcaaagcttggaagaaaccaagaataacattgctcagttctacttggctaatcccttgggacgttggggaatagaactaaaaagcaatggtcagtttattggaaccattgacttgcacaagattgattctgttcttaagaaggcagctattggctacattatcaataaaaagtattggaatcaaggattaacgacagaagccaatcgtgctgtgattgagctagcttttgagaagatagggatgaataagttgactgcccttcacgataaggctaatcccgcgtcaggaaaggtcatggagaaatcaggcatgcgtttttcccatgcagaaccatatgcttgtatggaccagcatgaaaaaggccgaatcgtgacaagagttcattatgtcttgaccaaggaagactattttgcaaataaataagcagttgaaaagaaatttttcgactgttttttcttcctcttacgaataatctaagagaggagaaaatatggaagcaattatcgagaaaatcaaagagtataaaatcatcgtcatctgtactggtctgggcttgcttgtaggaggatttttcctgctaaaaccagctccacaaacacctgtcaaagagacgaatttgcaggctgaagttgcagctgtttccaaggactcatcgaccgaaaaggaagtgaagaaggaagaaaaggaagaaccccttgaacaagatctaatcacagtagatgtcaaaggtgctgtcaaatcgccagggatttatgacttgcctgtaggtagtcgagtcaatgatgctgttcagaaggctggtggcttgacagagcaagcagacagcaagtcgctcaatctagctcagaaagttagtgatgaggctctggtttacgttcctactaagggagaagaagcagttagtcaacagactggttcggggacagcttcttcaacaagcaaggaaaagaaggtcaatctcaacaaggccagtctggaagaactcaagcaggtcaagggactgggaggaaaacgagctcaggacattattgaccatcgtgaggcaaatggcaagttcaagtcagtagacgagctcaagaaggtctctggcattggtggcaaaacaatagaaaagcttaaagactatgttacagtggattaagaatttctctattcccctaatttacctgagttttctattactttggctttattacgctattttctcagcatcttatcttgctttgttgggctttgtttttctgctagtctgtctctttatccaatttccgtggaaatctgctggtaaagttctaataatttgcggaatctttggattttggtttgtttttcaaaattggcaacagagtcaagcgagtcaaaatctggcggattctgttgaaagggtacggattttgcctgatactattaaggttaatggtgatagtctatcctttcgtggcaagtctaacggtcgtgctttccaagtctattataaactccagtccgaggaggagaaagaagcctttcaagctttaactgacctgcatgagataggactagaagggaagctttcggagccagaagggcagagaaattttggtggctttaattaccaagcctatctgaagactcagggaatttaccagactctcaatatcaaaacaatccagtcacttcaaaagattggcagttgggatataggagaaaacttgtccagtttacgtcgaaaggctgtggtttggattaagacgcactttccagaccctatgggcaattacatgacaggactcttgctgggacatctggacaccgactttgaggagatgaatgagctttattccagtctaggaattatccacctctttgccctatctggcatgcaggtaggttttttcatgaatggatttaagaaacttctcttgcgattgggcttgacccaagaaaagttgaaatggctgacttatcccttttcccttatctatgcgggactaactggattttcagcatcggttattcgcagtctcttgcaaaagctactggctcaacatggggttaagggcttggataattttgccttgacggtgcttgtcctctttattgtcatgccaaactttttcttgacagcaggaggagtcttgtcctgcgcttatgcttttatcctgaccatgaccagcaaagaaggggaggggctcaaggctgttactagtgaaagtctagtcatctccttgggcatattgcccattctatccttctattttgcggaatttcaaccttggtctatccttttgacctttgtcttttcctttctttttgacttggtcttcttaccgctcttgtctatcttatttgtcctttcctttctctatccagtcattcagctgaactttatctttgaatggttagagggcattattcgcttggtctcgcaggtggcaaggagaccacttgtctttggtcaacccaacgcatggcttttaatcttattgttaatttccttggctttggtctatgatttgaggaaaaacattaaaggattaacagtattgagtttattgattacaggtctctttttccttaccaagtatccactggaaaatgaaatcaccatgctggatgtggggcaaggagaaagtattttctacgggatgtaactgggaaaaccattctcatagatgtaggtggtaaggcagaatcttataagaaaatcaaaaaatggcaagaaaagatgacgaccagcaatgcccagcgaaccttgattccctatctcaaaagtcgaggagtagctaagattgaccagctaattttgactaacacggacaaggagcatgttggagatttgtcagagatgaccaaggctttccatgtaggggagattctagtatcaaaagacagtctgaaacagaaggaatttgtggcagaactacaggcgactcaaacaaaggtgcgtagtatgatagtaggggagaacttgcccatttttggaagtcagttagaagttctatctccaaggaaaatgggagatggaggacacgatgataccctagttctgtatgggaaattcttggataagcaatttctcttcacgggaaatttggaggagaaaggagagaaggacttgctgaagcactatccagacttgaaagtaaatgttttgaaagctagccaacatggcaataaaaaatcatcaagtccagcctttctagaaaaactcaaaccagagcttactcttatctcagttggaaagagcaatcgaatgaaactcccccatcaggaaacattgacacgactggaaggtatcaatagcaaagtttatcgaactgaccagcaaggagctatacgttttaaggggttggatagttggaaaatcgaaagtgttcgataggaaggataaatgttgtagattagtgaaataaactaaaaatttgttgcataataatgataaaaatggtataatgaaaacgtattcaatattgaggatataaaatcattaaaaatcagcaaaagttgttttattagttagtttataatctattggtcttcttcagtccagtgtatctgctgtgacagtcactaaaagttacaagtatgattggaatacggtttgggaatatagtaccaactatcacgaccatcagtatgcttggattccgtcatggtctcgttatgacagctattctgagtataaagttggcggaggctggaactacgctcgttatgaggtcataaactattacagcggaggctattaattcttaaagagtgagaaaaaggagggctagatatgttgcagcttactcatgtgaccttaaaaacgcgacaagtcatcttgcaagatgtggatttcacctttaaaaagggtagggtttatggtcttcttgctatcaatggctctggaaagacgaccctgttccgtgccattagcaatttaattcccataagtagtggaaatatcgcagcccctccttctttattttattatgagagtattgaatggctggatggaaacttaagtgggatggactaccttcgtcttatcaaaaacatctggaagtcaggtctgaacttgagggatgaaatcgcctattgggaaatgtctgactatatcagtcttcccattcgcaagtattccttaggcatgaagcaacgcttggtgattgccatgtatttcctcagtcaggccaaatgctggctcatggatgagattacaaatggcttagatgagtattatcgacagaagttttttgataggctagcacaaatcgatagacaagaacagctggttcttttaagttcccactataaggaagagttggttgatgtctgcgatagagtagtaaccattcatcaggggcagatagaagaggtttagtttatgaaagatgttagtctatttttattgaaaaaagttttcaaaagccgcttaaactggattgtcttagctttatttgtatctgtactcggtgttaccttttatttaaatagtcagactgcaaactcacacagcttggagagcaggttggaaagtcgcattgcagccaacgagagggctatcaatgaaaatgaagagaaactctcccaaatgtctgataccagctcggaggaataccagtttgctaaaaataatttagacgtgcaaaaaaatcttttgacgcgaaagacagaaattctgactttattaaaagaagggcgctggaaagaagcctactatttgcagtggcaagatgaagagaagaattatgaatttgtatcaaatgacccgactgctagccctggcttaaaaatgggggttgaccgcgaacggaagatttaccaagccctgtatcccttgaacataaaagcacatactttggagtttccgacccacgggattgatcagattgtctggattttagaggttatcatcccaagtttgtttgtggttgctattatttttatgctaacacaactatttgcagaaagatatcaaaatcatctggacacagctcacttatatcctgtttcaaaagtgacatttgcaatatcctctcttggagttggagtgggatatgtaactgtgctgtttatcggaatctgtggcttttcttttctagtgggaagtctgataagtggttttggacagttagattatccctacccaatttatagcttagtgaatcaagaagtaactattgggaaaatacaagatgtattatttcctggcttgctcttagctttcttagcctttatcgtcattgtggaagttgtgtacttgattgcttactttttcaagcaaaaaatgcctgtcctctttctttcactcattgggattgttggcttattgtttggtatccaaaccattcagcctcttcaaaggattgcacatctgattccctttacttacttgcgttcagtggagattttatctggaagattacctaagcagattgataatgtcgatctaaattggagcatgggaatggtcttacttccttgcctgattatctttttgctattgggaattctatttattgaaagatggggaagttcacagaaaaaagaattttttaatagattctagctttcctataggtagggaaaataagtaaaaactaacatagagagggaatcaacttgattctctctttttgattcgaaaaccaaaccaaaatacaaacacaaacttttcaaaaaataactttttatcttgacaagagctagaaaacttggtatcatataaaagttgagaaaagcagaagtgagagcttctcgccttgtgacattaagttgcctggccctacggatgaaaagtttcgaagaaacgctatcataacgtgcgggcttgtatatttacaagtccgctattgtttttctctaataaaacaaaagaggtgaaaaccatagcaaagcaagacttattcatcaatgatgagattcgtgtacgtgaagttcgcttgattggtcttgaaggagaacagctaggtatcaagccactcagtgaagcgcaagctttggctgataacgctaatgttgacctagtattgattcaaccccaagccaaaccgcctgttgcaaaaattatggactacggtaagttcaaatttgagtaccagaagaagcaaaaagaacaacgtaaaaaacaaagcgttgttactgtgaaagaagttcgtctaagtccaacaattgacaagggtgactttgatacaaaacttcgtaatgcacgtaagttccttgaaaaaggaaataaagttaaggtatctattcgctttaagggtcgtatgattacccataaagagattggtgcaaaagttttagccgagtttgctgaagcaactcaagatattgccatcatcgaacaacgtgctaaaatggatggacgtcaaatgttcatgcaattggcgccagcgactgacaaaaaataattgtcagaaagttaaataaaggagaaaaaatcatgccaaaacaaaaaacacaccgcgcatcagctaaacgtttcaaacgtacaggttctggtggacttaaacgtttccgtgcttacacttctcaccgtttccacggaaaaactaagaaacaacgtcgtcatcttcgtaaagcatctatggtgcattcaggagattacaaacgtatcaaagcaatgcttactcgcttgaaataatagcttgactgtaagtaaacaattctaggaaatatttggaggaaataaaacatggcacgtgttaaaggtggcgttgtatcacgcaaacgtcgtaaacgtattcttaaattagcaaaaggttactatggagctaaacacatcttgttccgtactgcaaaagaacaagtaatgaactcttactactatgcataccgtgaccgtcgtcagaaaaaacgtgacttccgcaaattgtggattactcgtatcaatgcggcagctcgtatgaacggactttcatactcacaattgatgcatggtttgaaattggctgagatcgaagttaaccgtaaaatgcttgctgacttggctgttaacgatgcagtagctttcacagctcttgcagatgcagctaaagcaaaacttggtaaataacaactgatgagactggaacaggattgtccagtcttttttaaaataaaggagaaagatatggcttcaaaaatgctacacacttgcttacgagtagaaaatcttgaaaaatcaatcgcattttatcaagatgcttttggttttaaagaattgcgtcgcagagattttccagaccatgccttcacgattgtctatctaggtcttgagggcgatgactatgagttggagttgacttataactacgatcacggtccgtatgtggttggtgatgggtttgcccatatcgccctcagtacacctgatcttgaggcacttcatcaagaacacagtgcaaaaggctatgaagtgactgagccaaatggtctaccaggaactacaccaaactattactttgtcaaagaccctgatggatataaggtcgaagtcattcgtgaaaaataatttcgtgcaagttaagtagaatattcgttttctacttgactttttttagctgaaagagtatactaataaaaattcaacctttaaggggagtccagagagactcacaaggtgtcagataaaagaatggtgcaattttctagaggagactttttgagtgtgctctcttgtgttgtacgattttaactgaggccttgcactagcaaggtcttttctttatctggtccccttaaaatttaaggaggaaaagttatgaatcccacatgtaagaagcgtttgggtgtcattcggttggaaaccatgaaggtggttgcacaagaggaaatcgcgccagcaatctttgaattagtcctagaaggagaaatggttgaagccatgcgagcaggccaatttcttcatctgcgtgtaccggacgatgcccatctcttacgtcgtcctatttcaatttcgtctattgacaaggcaaacaagcagtgtcacctcatttatcggattgacggagctgggactgcaattttttcaaccttaagtcagggagacactcttgatgtgatggggcctcagggaaatggttttgacttgtctgaccttgatgagcagaatcaggttctccttgttggtggtgggattggtgttccacccttgcttgaggtggccaaggaattgcatgaacgtggagtgaaagtagtgacagtcctcggttttgctaataaggatgctgttattttgaaaacggaattggctcagtatggtcaggtctttgtaacgacagatgatggttcttatggcatcaagggaaatgtttccgttgttatcaatgatttagacagtcagtttgatgctgtttactcgtgtggggctccaggaatgatgaagtatatcaatcaaacctttgatgatcacccaagagcctatttatctctggaatctcgtatggcttgtgggatgggagcttgctatgcctgtgttctaaaagtaccagaaaacgagacggtcagccaacgcgtctgtgaagatggtcctgttttccgcacaggaacagttgtattataaggagaaaattatgactacaaatcgattacaagtttctctacctggtttggatttgaaaaatccgattattccagcatcaggctgttttggctttggacaagagtatgccaagtactatgatttagaccttttaggttctattatgatcaaggcgacaacccttgaaccacgttttgggaatccaactccaagagtggcagagacgcctgctggtatgctcaatgcaattggcttgcaaaatcctggtttagaggttgttttggctgaaaagctaccttggctggaaagagaatatccaaatcttcctattattgccaatgtagctggtttttcaaaacaagagtatgcagctgtttctcatgggatttccaaggcaactaatgtaaaagctatcgagctcaatatttcttgtcccaatgttgaccactgtaatcatggacttttgattggtcaagatccagatttggcttatgatgtggtgaaagcagctgtggaagcctcagaagtgccagtttatgtcaaattaaccccgagtgtgaccgatatcgttactgtcgcaaaagctgcagaagatgcgggagcaagtggcttgaccatgatcaatactctggttggaatgcgctttgacctcaaaactagaaaaccaatcttggccaatggaacaggtggaatgtctggtccagcagtctttccagtagccctcaaactcatccgccaagttgcccaaacaacagacctgcctatcattggaatgggaggagtggattcggctgaagctgccctagaaatgtatctggctggggcatctgctatcggagttggaacagctaactttaccaatccttatgcctgccctgacatcatcgaaaatttaccaaaagtcatggataaatacggtattagcagtctggaagaactccgtcaggaagtaaaagagtctctgaggtaaactgcaatcaatctgttcttgattttttattagtttgtaatatgaatttaggagaattttggtacaataaaataaataagaacagaggaagaaggttaatgaagaaagtaagatttatttttttagctctgctatttttcttagctagtccagagggtgcaatggctagtgatggtacttggcaaggaaaacagtatctgaaagaagatggcagtcaagcagcaaatgagtgggtttttgatactcattatcaatcttggttctatataaaagcagatgctaactatgctgaaaatgaatggctaaagcaaggtgacgactatttttacctcaaatctggtggctatatggccaaatcagaatgggtagaagacaagggagccttttattatcttgaccaagatggaaagatgaaaagaaatgcttgggtaggaacttcctatgttggtgcaacaggtgccaaagtaatagaagactgggtctatgattctcaatacgatgcttggttttatatcaaagcagatggacagcacgcagagaaagaatggctccaaattaaagggaaggactattatttcaaatccggtggttatctactgacaagtcagtggattaatcaagcttatgtgaatgctagtggtgccaaagtacagcaaggttggctttttgacaaacaataccaatcttggttttacatcaaagaaaatggaaactatgctgataaagaatggattttcgagaatggtcactattattatctaaaatccggtggctacatggcagccaatgaatggatttgggataaggaatcttggttttatctcaaatttgatgggaaaatggctgaaaaagaatgggtctacgattctcatagtcaagcttggtactacttcaaatccggtggttacatgacagccaatgaatggatttgggataaggaatcttggttttatctcaaatctgatgggaaaatagctgaaaaagaatgggtctacgattctcatagtcaagcttggtactacttcaaatccggtggttacatgacagccaatgaatggatttgggataaggaatcttggttttacctcaaatctgatgggaaaatagctgaaaaagaatgggtctacgattctcatagtcaagcttggtactacttcaaatctggtggctacatggcgaaaaatgagacagtagatggttatcagcttggaagcgatggtaaatggcttggaggaaaaactacaaatgaaaatgctgcttactatcaagtagtgcctgttacagccaatgtttatgattcagatggtgaaaagctttcctatatatcgcaaggtagtgtcgtatggctagataaggatagaaaaagtgatgacaagcgcttggctattactatttctggtttgtcaggctatatgaaaacagaagatttacaagcgctagatgctagtaaggactttatcccttattatgagagtgatggccaccgtttttatcactatgtggctcagaatgctagtatcccagtagcttctcatctttctgatatggaagtaggcaagaaatattattcggcagatggcctgcattttgatggttttaagcttgagaatcccttccttttcaaagatttaacagaggctacaaactacagtgctgaagaattggataaggtatttagtttgctaaacattaacaatagccttttggagaacaagggcgctacttttaaggaagccgaagaacattaccatatcaatgctctttatctccttgcccatagtgccctagaaagtaactggggaagaagtaaaattgccaaagataagaataatttctttggcattacagcctatgatacgaccccttacctttctgctaagacatttgatgatgtggataagggaattttaggtgcaaccaagtggattaaggaaaattatatcgataggggaagaactttccttggaaacaaggcttctggtatgaatgtggaatatgcttcagacccttattggggcgaaaaaattgctagtgtgatgatgaaaatcaatgagaagctaggtggcaaagattagtactataagtgaatatgatttgagtgaatagtaagttaaaaatcctgatttcaagtaaaatcaggattttttcatggatgcaatttttttggagtctggtgtgacgcggagggtcttttgtcctgtgtaagtgacaaagccgggttttccaccagttggtttattgagttttttgacttcaatcatatctacctgcaccagattcgacaggcgcccttgagagaagtaggcagctaactctgctgcgtctgtcttgactgcatcagatgggtcaagatttcctgagatgacaacatggcttccaggaatgtccttagcatggaaccaaagttcctccttgcgggccattttaaaggtcaattcctcattttgaagattgtttcgtccgacatagatgatggttttgccatcgcttgctagatattgttctagttttttgcgtttctggattttctcccgttgtcttctgcggataaaacctgtttgaatcaattcttcacggatttcagcgatttcttccagtccagcttggttgaggacggtttctacactttccagatagagaatagtggctttggtttcttcaatcaaatcagtcaagtatttgacagcttctttgagtttctgataccgtttaaaatagcgttgggcattctggttgggagtcagagccttatcaagcgcaatcatgataggttggttggtatagtagttgtctaggataacctggtcttggtcgttaggcacttggtggaggaaggttgtcagcaattctcctttttgacgaaattcttcagcgttgtctgtcgccagtaactctttttcctgttttttgagtttgtgtcggtttttctgaagttcattttcaacacgacgaatcagttcactggcctgctgtttgacgcggtcgcgctcagccttatccttatagtaggtgtccaacaaatcagaaagatttgcaaaaggctctcccacctgatttgcaaaaggaactggactgaaggaagtctcagtcaagcatggcttggtttcttgattgaaaaaatttcggaaagcggaaagtttttcactaaccagtatcctttccaattcatttgccgtatcgcgtcccagaccttgaaagaggctttgaagattttttgctgttagttcttgggtttgcaggatttcaaagagcttttcatccttgatagtaaaaggattgagagattttgtacttggcggagcgatataggtcgatcctggaagtaaggtgcggtagctattttgtgaaaagccgacgtgtttgataacttcgaggattttatgactgcttttatcgaccagtagaatattactgtgtttccccataatttcgataatcaaggtagcctggatatggtctccaatctcgtttttattggaaactgtaatttccacaatacggtcattttccacttgctcaatcgactcaatcagggccccctgcaaatactttctcaaaaccatgataaaggtagaaggttgagctggattttcaaaagtcgtttgggtcagctgaatgcgtccaaaaactggatgggcagaaaggagcaggcgatggctttggcgattgctgcggatttgcaagaccaactcttgttcaaaaggctgattgattttctggatgcgaccattcactaattcgcttcgcaattcctcaactatgtggtgtaaaaaaaatccgtcaaatgacatcgttctctccttgtgattgtattccatagtattatatcaaaaaggtagaataaaatcatggaaatgtggtataataaagccaagtaaagagaaacgagaagcacatgtatattgaaatggtagatgaaactggtcaagtttcaaaagaaatgttgcaacaaacccaagaaattttggaatttgcagcccaaaaattaggaaaagaagacaaggagatggcagtcacttttgtgaccaatgagcgtagtcatgaacttaatctggagtaccgtaacaccgaccgtccgacagatgtcatcagccttgagtataaaccagaattggaaattgcctttgacgaagaggatttgcttgaaaattcagaattggcagagatgatgtctgagtttgatgcctatattggggaattgttcatctctatcgataaggctcatgagcaggccgaagaatatggtcacagctttgagcgtgagatgggcttcttggcagtacacggctttttacatattaacggctatgatcactacactccggaagaagaagcggagatgttcggtttacaagaagaaattttgacagcctatggactcacaagacaataaacgaaaatggaaaaatcgtgacttgatatccagtttagaatttgctttgacaggtatttttactgctatcaaggaagaacgcaatatgcgaaaacacgcagtgacggctctagtggtcatccttgcaggttttgtttttcaggtgtcacgaatcgaatggctctttctcctattgagtattttcttggtagtagcctttgagattatcaactctgctattgaaaatgtggtggatttggccagtcactatcacttttccatgctggctaaaaatgccaaggatatggcggccggcgcggtattagtggtttctcttttcgcagccttaacaggcgcattgatttttctcccacgaatctgggatttattattttaaacagtaagaggaaattatgacttttaaatcaggctttgtagccattttaggacgtcccaatgttgggaagtcaacctttttaaatcacgttatggggcaaaagattgccatcatgagtgacaaggcgcagacaacgcgcaataaaatcatgggaatttacacgactgataaggagcaaattgtctttatcgacacaccagggattcacaagcctaaaacagctctcggagatttcatggttgagtctgcctacagtacccttcgcgaagtggacactgttcttttcatggtgcctgctgatgaagcgcgtggtaagggggacgatatgattatcgagcgtctcaaggctgccaaggttcctgtgattttggtggtgaataaaatcgataaggtccatccagaccagctcttgtctcagattgatgacttccgtaatcaaatggactttaaggaaattgttccaatctcagcccttcagggaaataacgtgtctcgtctagtggatattttgagtgaaaatctggatgaaggtttccaatatttcccgtctgatcaaatcacagaccatccagaacgtttcttggtttcagaaatggttcgcgagaaagtcttgcacctaactcgtgaagagattccgcattctgtagcagtagttgttgactctatgaaacgagacgaagagacagacaaggttcacatccgtgcaaccatcatggtcgagcgcgatagccaaaaagggattatcatcggtaaaggtggcgctatgcttaagaaaatcggtagcatggcccgtcgtgatatcgaactcatgctaggagacaaggtcttcctagaaacctgggtcaaggtcaagaaaaactggcgcgataaaaagctagatttggctgactttggctataatgaaagagaatactaagtagaggtaggctcatgcctgcttcttgtttttacagaaggaggacttatgcctgaattacctgaggttgaaaccgtttgtcgtggcttagaaaaattgattataggaaagaagatttcgagtatagaaattcgctaccccaagatgattaagacggatttggaagagtttcaaagggaattgcctagtcagattatcgagtcaatgggacgtcgtggaaaatatttgcttttttatctgacagacaaggtcttgatttcccatttgcggatggagggcaagtatttttactatccagaccaaggacctgaacgcaagcatgcccatgttttctttcattttgaagatggtggcacgcttgtttatgaggatgttcgcaagtttggaaccatggaactcttggtgcctgaccttttagacgtctactttatttctaaaaaattaggtcctgaaccaagcgaacaagactttgatttacaggtctttcaatctgcccttgccaagtccaaaaagcctatcaaatcccatctcctagaccagaccttggtagctggacttggcaatatctatgtggatgaggttctctggcgagctcaggttcatccagctagaccttcccagactttgacagcagaagaagcgactgccattcatgaccagaccattgctgttttgggccaggctgttgaaaaaggtggctccaccattcggacttataccaatgcctttggggaagatggaagcatgcaggactttcatcaggtctatgataagactggtcaagaatgtgtacgctgtggtaccatcattgagaaaattcaactaggcggacgtggaacccacttttgtccaaactgtcaaaggagggactgatgggaaaaatcatcggaatcactgggggaattgcctctggtaagtcaactgtgacaaattttctaagacagcaaggctttcaagtagtggatgccgacgcagtcgtccaccaactacagaaacctggtggtcgtctgtttgaggctctagtacagcactttgggcaagaaatcattcttgaaaacggagaactcaatcgccctctcctagctagtctcatcttttcaaatcctgatgaacgagaatggtctaagcaaattcaaggggagattatccgtgaggaactggctactttgagagaacagttggctcagacagaagagattttcttcatggatattcccctactttttgagcaggactacagcgattggtttgctgagacttggttggtctatgtggaccgagatgcccaagtggaacgcttaatgaaaagggaccagttgtccaaagatgaagctgagtctcgtctggcagcccagtggcctttagaaaaaaagaaagatttggccagccaggttcttgataataatggcaatcagaaccagcttcttaatcaagtgcatatccttcttgagggaggtaggcaagatgacagagattaactggaaggataatctgcgcattgcctggtttggtaattttctgacaggagccagtatttctttggttgtaccttttatgcccatcttcgtggaaaatctaggtgtagggagtcagcaagtcgctttttatgcaggcttagcaatttctgtctctgctatttccgcggcgctcttttctcctatttggggtattcttgctgacaaatacggccgaaaacccatgatgattcgggcaggtcttgctatgactatcactatgggaggcttggcctttgtcccaaatatctattggttaatctttcttcgtttactaaacggtgtatttgcaggttttgttcctaatgcaacggcactgatagccagtcaggttccaaaggagaaatcaggctctgccttaggtactttgtctacaggcgtagttgcaggtactctaactggtccctttattggtggctttatcgcagaattatttggcattcgtacagttttcttactggttggtagttttctatttttagctgctattttgactatttgctttatcaaggaagattttcaaccagtagccaaggaaaaggctattccaacaaaggaattatttacctcggttaaatatccctatcttttgctcaatctctttttaaccagttttgtcatccaattttcagctcaatcgattggccctattttggctctttatgtacgcgacttagggcagacagagaatcttctttttgtctctggtttgattgtgtccagtatgggcttttccagcatgatgagtgcaggagtcatgggcaagctaggtgacaaggtgggcaatcatcgtctcttggttgtcgcccagttttattcagtcatcatctatctcctctgtgccaatgcctctagcccccttcaactaggactctatcgtttcctctttggattgggaaccggtgccttgattcccggggttaatgccctactcagcaaaatgactcccaaagccggcatttcgagggtctttgccttcaatcaggtattcttttatctgggaggtgttgttggtcccatggcaggttctgcagtagcaggtcaatttggctaccatgctgtcttttatgcgacaagcctttgtgttgcctttagttgtctctttaacctgattcaatttcgaacattattaaaagtaaaggaaatctagtgcgagtaaaaatcaatctcaaatgctcctcttgtggcagtatcaattacctaaccagtaaaaattcaaaaacccatccagacaagattgaggttttaaagtattgtcccaaggaaagaaaagtaaccctacatcttgaatctaagtagattttatggtaaaataatagggattttaaggagtttgatatgtataacctattattaaccattttattagtattatctgttgtgattgtgattgcaattttcatgcaaccaaccaaaaaccaatccagcaatgtatttgatgccagttcaggtgatttgtttgaacgcagtaaagctcgcggttttgaagctgtaatgcagcgtttgacagggattttagtctttttctggctagccattgccttagcattgacggtattatcaagtagataagaaaataatgggcaggactaggtctttgcctctttttatttttaaaggatgtttgagaaggttttacagtaaaagaaaattaaaaaatctagaaagaaaatatgaaagatagaataaaagaatatttacaagacaagggaaaggtgactgttaatgatttggctcaggctttgggaaaagacagttccaaggattttcgtgagttgattaaaaccttgtccttaatggaaagaaagcaccaaattcgttttgaagaagatggtagtctgacattagaaattaagaaaaaacatgagattaccctcaaggggatttttcatgcccataaaaatggctttggctttgttagtctggaaggcgaggaggacgacctttttgtagggaaaaatgatgtcaactatgctattgatggtgataccgtcgaggtagtgattaagaaagtcgctgaccgcaataagggaacagcagcagaagccaaaattattgatatcctagaacacagtttgacaacagttgtcgggcaaatcgttctggatcaggaaaaacctaagtatgctggctatattcgttcaaaaaatcagaaaatcagtcaaccgatttatgttaagaaaccagccctaaaattagaaggaacagaagttctcaaagtctttatcgataaatacccaagcaagaaacatgatttctttgtcgcgagtgttctcgatgtagtgggacactcaacggatgtcggaattgatgttcttgaggtcttggaatcaatggacattgtatccgagtttccagaagctgttgttaaggaagcagaaagtgtgcctgatgctccgtctcaaaaggatatggaaggtcgtctggatctaagagatgaaattacctttaccattgacggtgcggatgccaaggacttggacgatgcagtgcatatcaaggctctgaaaaatggcaatctggagtttggggttcacatcgcagatgtttcttattatgtgaccgaggggtctgcccttgacaaggaagcccttaaccgtgcgacttctgtttacgtgacagaccgagtggtgccaatgcttccagaacgactatcaaatggcatctgctctctcaatccccaagttgaccgcctgacccagtctgctattatggagattgataaacatggtcgtgtggtcaactataccattacacaaacagttatcaagaccagttttcgtatgacctatagcgatgtcaatgatatcctagctggcgatgaagaaaagagaaaagaatatcataaaattgtatcaagtatcgaactcatggccaagcttcatgaaactttagaaaacatgcgtgtgaaacgtggagctctcaattttgataccaatgaagcgaagattttagtggataaacaaggtaagcctgttgatatcgttcttcggcagcgtggtattgccgagcggatgattgagtcttttatgttgatggctaatgaaacagttgccgaacatttcagcaagttggatttgccttttatctatcgaattcacgaggagcctaaggctgaaaaggttcagaagtttattgattatgcttcgagttttggcttgcgcatttatggaactgccagtgagattagtcaggaggcacttcaagacatcatgcgtgctgttgagggagaaccttatgcagatgtattgtccatgatgcttcttcgctctatgcagcaggctcgttattcggagcacaatcacggccactatggactagctgctgactattatactcactttaccagtccaattcgtcgttatccagaccttcttgttcaccgtatgattcgggattacggccgttctaaggaaatagcagagcattttgaacaagtgattccagagattgcgacccagtcttccaaccgtgaacgtcgtgccatagaagctgagcgtgaagtcgaagccatgaaaaaggctgagtatatggaagaatacgtgggtgaagagtatgatgcagttgtatcaagtattgtcaaattcggtctctttgtcgaattgccaaacacagttgaaggcttgattcacatcactaatctgcctgaattttatcatttcaatgagcgtgatttgactcttcgtggagaaaaatcaggtatcactttccgagtgggtcagcagatccgtatccgtgttgaaagagcggataaaatgactggagagattgatttttcattcgtacctagtgagtttgatgtgattgaaaaaggcttgaaacagtctagtcgtagtggcagagggcgtgattcaaatcgtcgttcggataagaaggaagacaagagaaaatcaggacgctcaaatgataagcgtaagcattcacaaaaagacaagaagaaaaaaggaaagaaacctttttacaaggaagtagctaagaaaggagccaagcatggcaaagggcgagggaaaggtcgtcgcacaaaataaaaaggcacgccacgactatacaatcgtagatacgctagaggcagggatggtcctgactggaactgaaatcaagagtgtacgagctgctcgaattaatctcaaggatggctttgctcaagtgaaaaatggagaagtttggctgagcaatgttcatatcgcgccttacgaagagggcaatatctggaaccaggaaccagaacgtcgtcgtaaactcctgctccataaaaagcaaattcaaaaattggaacaagagatcaaagggacaggaatgaccttagttccccttaaggtctatataaaagatggctacgctaagcttcttttaggacttgccaaagggaagcatgactatgacaaacgggagtctatcaaacgtcgtgagcaaaatcgagatatcgcgcgtgtgatgaaagctgttaatcagcgataaaaagaggaattgaaaatggaaaaattagttgcctataaacgcatgcctttgtggaataaacaaacaatgcctgaagctgttcagcaaaagcacaatacaaaagttgggacttgggggaaaattactgtcttgaagggagctctcaagtttattgaattgacagaagaaggggaagttctagctgaacacctctttgaagcaggggcagacaatccaatggcccaacctcaagcctggcaccgagtggaagctgccacagatgatgtggaatggtacttggaattttattgtaaacctgaggattattttgctaaaaaatacaataccaatcctgttcattcagaggtcctagaggccatgcagacagtgaaacaagggaaagctttggatttgggttgtggtcaggggcgtaattctctttttctagcccagcaagattttgatgtgacggctgtagatcaaaatggactagctcttgaaatcttgcaaagcattgtggagcaggaagatttggacatgcctgttggcctttacgatatcaattcagctagcattgaacaagaatatgattttatcgtttcaacagttgttctcatgtttctacaagcggaccgcattccagctattattcaaaatatgcaggagaaaaccagtgttggtggttacaaccttatcgtttgtgccatggacacggaggattatccttgctcggttaacttcccattcacctttaaagaaggagaactggcagactattacaaggattgggaattggttaagtacaatgaaaatccaggccatttgcaccgtcgcgatgagaatggcaatcgtattcaactacgctttgcgaccttactagctaagaaaatcaagtaaacacacatgaagattaggaattttcctgatcttttttcttttttacgaatgatatagaaaaggagggaattcatgtttgttgcgagagatgctaggggagaattggtaaatgtgttagaggataaacttgagaagcaagcatacacctgcccagcttgtggaggccagctccatttgcgtcaaggaccaagtgtacggacgcattttgcccataaatccttaaaagactgtgattttttctttgaaaatgaaagtccagaacacctggccaataaggaatccctctatcactggttgaaaaaagagacaaaggttcaattagagtacccgctttcagaacttaaacagattgcggatgtatttgtaaatggcaatctagctctagaagttcagtgtagtcccttgcctcagaaagtccttaaagagcgaagtgagggctatcgtagtcagggttaccaagtactgtggttgctgggtcaaaaactgtggctcaaggagcgtttgactcgtctacagcaaggttttctttatttcagtcaaaacatgggcttttatgtttgggaattagacaaggaaaaacaagttttaagactcaaatacctgatttaccaggatctccgcggtaaactccattatcaaatcaaggaattttcctatggtcaaggtagtttattggaaatattgcgtcttccctataagagacaaaaaatatctcattttacagtttctgaggacaaggacatctgtcgctatatccggcaacaactttattatcaaaatctcttttggatgaaagaacaagcagaagcctatcaaaagggagaaaatatcctgacttatggactgaaagaatggtatccacaaattcgaccaatagtgggcaaatttttccagattgaacaagacttgactagctattatcagcacttttatacctattaccaaaaaaatcctcaaaatgattggcaaaagctttatccaccagccttttatcagcaatatttcttgaaaaatatggtagaatagaaaggatggaggaatctaatggtattacaaagaaatgaaataaatgaaaaagatacatgggatctatcaacgatctacccaactgaccaggcttgggaagaagccttaaaagatttaacagaacaattggagacagtagcccagtatgaaggccatctcttggatagtgcggataacctactagaaatcactgaattttctcttgaaatggaacgccagatagagaagctttacgcttatgctcatatgaagaatgaccaggatacacgtgaagctaagtatcaagagtactatgccaaggccatgacactctacagccagttagaccaagccttttcattctatgagcctgaatttatggagattagcgaaaagcagtatgctgactttttagaagctcaaccaaagctgcaggtttatcaacactattttgacaagcttttgcaaggcaaggatcacgttctttcacaacgtgaagaagaattattggctggagctggagaaatctttggttcagcaagtgaaaccttcgctatcttggacaatgcggatattgtgttcccttatgtcctagacgatgatggtaaagaagttcagctatctcatgggacttacacacgtttgatggagtctaaaaaacgtgaggttcgccgtggtgcctatcaagctctttatgcgacttacgaacaattccaacacacctatgccaaaaccttgcaaaccaatgttaaggtgcaaaattaccgtgctaaagttcgtaactacaagagtgctcgtcatgcagccctcgcagcgaattttgttccagaaagtgtttatgacaatttggtagcagcagttcgcaagcatttgccactcttacatcgctatcttgagcttcgttcaaaaatcttggggatttcagatctcaagatgtacgatgtctacacaccgctttcatctgttgaatacagttttacctaccaagaagccttgaaaaaagcagaagatgctttggcagtcttgggtgaggattacttgagccgtgttaaacgtgccttcagcgagcgttggattgatgtttacgaaaatcaaggcaagcgttcaggtgcctactctggtggttcttatgataccaatgcctttatgcttctcaactggcaagacaatctggacaatctctttactcttgttcatgaaacaggtcacagtatgcattcaagctatactcgtgaaactcagccttatgtttacggggattactctatctttttggctgagattgcctcaactaccaatgaaaatatcttgacggagaaattattggaagaagtggaagacgacgcaacacgctttgctattctcaataacttcctagatggtttccgtggaacagttttccgccaaactcaatttgctgagtttgaacacgccattcaccaagcagatcaaaatggggaggtcttgacaagcgatttcctaaataaactctacgcagacttgaaccaagagtattatggtttgagtaaggaagacaatcctgaaatccaatacgagtgggctcgcattccacacttctactataactactatgtatatcaatattcaactggctttgcggccgcctcagccttggctgaaaaaattgtccatggtagtcaagaagaccgtgaccgctatatcgactacctcaaggcaggtaagtcggactatccacttaatgtcatgagaaaagctggtgttgatatggagaaggaagactacctcaacgatgcctttgcagtctttgaacgccgtttaaatgagtttgaagcccttgttgaaaaattaggattggcataaaatggttgaatcgtatagtaagaatgctaaccataacatgcgtcgtcctgtcgtcaaagaagaaattgtagacttgatgcgtcagcgtcaaaagcaggtcacaggtttcttgaaagaattggaagactttgcccgcaaggaaaatattcctattattccccatgaaacggttgcttatttccgttttcttatggaaaccatgcagcctaaaaatattctggaaattgggacggctatcggtttttcagctctcttgatggctgaacatgcgccaaatgctaagattacaactattgatcgtaatccagaaatgattggttttgccaaggaaaattttgcccagtttgacagtcgcaagcaaatcactctcctagagggagatgcggtggatgtcttatctacactgacagagtcttatgatttcgtctttatggattctgccaagtctaaatacatcgtctttctgccagaaatcctcaaacatttggaagttggtggtgtggttgtcttggatgatatttttcaaggtggtgatgttgccaaggatattatggaagtccgtcgtggtcagcgaaccatttatcgaggccttcaaaaattatttgatgcaaccttagacaatccagaactcaccgcaacattagtgcctttaggagatggtattctcatgcttcgtaaaaatgtagcagatgttcaactgtctgaaagcgaatgattttcagaaaaatttaagaaaaaatagtaaaatagatagagtaacacttatctcaaaggagtagacatgaagaaaaaattattggcaggtgccatcacactattatcagtagcaactttagcagcttgttcgaaagggtcagaaggtgcagaccttatcagcatgaaaggggatgtcattacagaacatcaattttatgagcaagtgaaaagcaacccttcagcccaacaagtcttgttaaatatgaccatccaaaaagtttttgaaaaacaatatggctcagagcttgatgataaagaggttgatgatactattgccgaagaaaaaaaacaatatggcgaaaactaccaacgtgtcttgtcacaagcaggtatgactcttgaaacacgtaaagctcaaattcgtacaagtaaattagttgagttggcagttaagaaggtagcagaagctgaattgacagatgaagcctataagaaagcctttgatgagtacactccagatgtaacggctcaaatcatccgtcttaataatgaagataaggccaaagaagttctcgaaaaagccaaggcagaaggtgctgattttgctcaattagccaaagataattcaactgatgaaaaaacaaaagaaaatggtggagaaattacctttgattctgcttcaacagaagtacctgagcaagtcaaaaaagccgctttcgctttagatgtggatggtgtttctgatgtgattacagcaactggcacacaagcctacagtagccaatattacattgtaaaactcactaagaaaacagaaaaatcatctaatattgatgactacaaagaaaaattaaaaactgttatcttgactcaaaaacaaaatgattcaacatttgttcaaagcattatcggaaaagaattgcaagcagccaatatcaaggttaaggaccaagccttccaaaatatctttacccaatatatcggtggtggagattcaagctcaagcagtagtacatcaaacgaatagtccaaatcaatgagtcagggaaaaaactcgacttcaggaaaaaatgaagcaaacattcccacaataaaacgcatagtacaaggtttgtactgccccccaaaaagttagacaattaatttatccgaaggatttagttctgtattgcacagagctaagtccttttagttttatcttaattctcttattgttgtaataatcaatatagtctataatggctcgttccaattgattaagtgatttaaatgttttctcatagccataaaacatttcggattttaaaatgccaaagaaagattccatcctaccgttgtcttggctgttgcccttacgtgacatggatgcttgaattcccttactctctaggaagcgatgataagaatcgtgttgatattgccagccttggtcactatggagaatcgtattctcgtagtgcttctctttgaatgcctgttccaacattaacgatcaatcaatttaatcatgtacctaagattagaattgtttatcccaaatttatttgaaagcttctctaagctatatccttgttttctaagttcatagatctgaactttatcatcataagttaatttcataataaaaacaccccaaaagttagattttttctgtctaacttttggggtgtagttcatgtacacctgatatgatgcgttttataattttaaagactttttgaccagcctcatttttttaacttgatactcagtgaaaagcaaagattaaactaggaagctagctgtaggctgctcaaagaacagctttgaggttgtagataaaacttgtgaggtcaccaacatatataatgtgaagctgacgtggtttgaatagattttagaagagtatgagtctggaagttttaatggataatgcaagattccatagaatgggtaagctagagttcttatgtgaagagtttgggcataaacttttaccttttcctccctactcatcttagtatagaaaagtgaatctgaaatagtacataactgcttctaaaacattcttataaattgatttaaattctcaaatcatattattcagttcttatttcattttgttctacaatcctgttgagaagacacgtgttcatatcaaaaaggtattggcaagttgcaatacctttttacgaggctctgttgtcttatttttgtttcaactgactatatctcctatggttctagttcagaaggctaggctataattatgattgataagaagtatcattccaagtattgggagtgaatgtttcaaaatcatgggtttctataatggtcaggctggcatttgctagaccgccatctttacgaagaagtggttctttatagcctaggagagtacgaagactggcagtaagattggcgccgtgtccgacaattagaatacgttcagctggactatcttttaatgatttgataaattggatggtccgttgagttgtactatagagggattcggctccgaacattcgagtgtcaaattgagcaagatttgaacgaaaagcctggatttgttgcgggtaaatagcttccaaggttgcaattttcaaaccttctaacttcccaagttgccattcacggagattaggaacgatttctaaagaacagggggtatagagttgactttggataatctcagcagatttgaccgctcgaggtaaatcacttgaataaatctgatcaaaaggaatttccttgagatactgaccaagtcgttttagggtttcaatggattcaggaagaagaggagaatcaccactagcaccttgaaaacgaccttcttggttccagagggtacgaccgtggcggacaaagtagagtttcattacttgatgtcctccaaaatatctacaaagtctgcctttacaaagctagccaagtcttgtggcgcgacgataatgctgtgtccgacttcgcctgcagagacaatcatttgatccaaatctagagcaattttatcgataaaaatgggataattgtgtttctgacgaattccgacaggattattggctccatgaatgtaaccagttgttttttctaagtccttttgtggaatcatgctcacttttttattgccagaaattttagctagtttcttttcagacaagtgctgagtgatagggacaattccgataatcggtccggtcttgtctcccaaaagcgccaaggttttgaaaatctgatctcgttcataaccttgaggaagctctccttctagggcattgatttgaatcccctgatgagggatagctgctttagataggatttgttccaccaatgtttttttgattttaactttttttgccattatttatatttatcctccaattgactcatccaaataccaagccagattcccagcgcaaagaagaaggcgatgatgacataaccgacaagtgaaagtcctgtgtattggatactttcagcgtttcctgcatttggaattaagatcaaaagggtacttgataggacgataccgatgatgaaatgatagacgcgtgagtggtagttgtttaaggcataatctatcaattttgaaaaaacgatgagagttgcacctgcaccaattccaatcggaaagaaggttcccaagaaatcaaaagttttaaaaccagtcaacataggagcatagagtcccaaaatcaaaagtaaatttgatgggctgaggccaggaaccaagacgccaagggccaatagtgcgcctgctaggacgaagttaagaaagctggcgcttaaggttccaacgacaaaatttaaggcatagagtcctaatccagaaatgataaaggttgtccataaccaagctaaatcaatcttgtctcggtcagattctcgagttgattctttgaggaggctaggaactgtaccgataatagctcccgcaaagctccataatacaaaaacctgataattttcaagcaggtattcaatcgggtaggaaaataagccgattcccagaagcataccgatggcaactggaataaagtacaaaacattttctttaaagtctttaaagggatgggccagaaagccaatcattcgttcatagattcctaagattgctgctagaacccctccggaaattcccggtaggataaatccaagagcaattacaatccctttaataacgcgtgctaaccatgagagcatatatttcctccaactatttctatttcaaaaaatccttactatattgtatcacaatcagacacaaaaagaaaaagcaaatgataaacaaatgcttttaaggttttaaaaaaagttttcgaaaggtttcttctttattttttaagggagagataacgttgatatctaaatcgtggtcaaagccggcaatttttcctttagatgtgtattggtgaatatcataatctaaatcagttttaggactgctctccaaaaatcctgagtctgagccgtaggacggaatccaaacagaggtaaacttgcctgtatcaatactgtgttcttccatgaagtagacaccaacgtagatgccgatgtttttagcacccagtgatgctagttttgctcgaaagttttcgacaccttcgttcatattagacatggttttgtcttccacgtcaagccaatagtaactagggctgtaaggagaggcagcattgtagaaaacttcggcagccttttccatttcttggacactttttccagctacataagcgtagacagcaactgggacattccgcttttgaagttcagtgatatgactcttataggccttgtctattccattgataaatgaagcatcattttcttttgtcgtttgagcaccactgtgaacacgaacaatagcacctgaaatattttgtgagagggcatcgtagttgatttcctcaggacgctgccagccagagaggtcaataatcggtttgtctaagtgtttcaaagcctgtgcttcaatctgtgctatattggattttgttttaaacgattggctgtcattaagtgggcgattgatgattaaaatgaacatcataatcccaaaaaaactaaataaaataagtggatgaatttgttttctcatatcttataattctaccctaaaaatcaaaaaaaatcaaaaaaatgggttaaggaagagactttagagcattttttcattcaagagtgcggaatgatttgaaatatggtataataaaagggaatttctacagaaaagagaagattatgtcaaattttgccattattttagcagcgggtaaagggactcgcatgaaatctgatttgccaaaagttttgcacaaggttgcgggtatttctatgttggaacatgttttccgtagtgtgggagctatccaacctgaaaagacagtaacagttgtaggacacaaggcagaattggttgaggaggtcttggctggacagacagaatttgtgactcaatctgaacagttgggaactggtcatgcagttatgatgacagagcctatcttagaaggtttgtcaggacacaccttggtcattgcaggagatactcctttaatcactggtgaaagcttgaaaaacttgattgatttccatatcaatcataaaaatgtggccactatcttgactgctgaaacggataatccttttggttatggacgaattgttcgtaatgacaatgctgaggttcttcgtattgttgagcagaaggatgctacagattttgaaaagcaaatcaaggaaatcaacactggaacatacgtctttgacaacgagcgtttgtttgaggctttgaaaaatatcaataccaataacgctcaaggcgaatactatattacagacgtcattggtattttccgtgaaactggtgaaaaagttggcgcttatactttgaaagattttgatgaaagtcttggggtaaatgaccgtgtggcgcttgcgacagctgagtcagttatgcgtcgtcgcatcaatcataaacacatggtcaacggtgttagctttgtcaatccagaagcaacttatatcgatattgatgttgagattgcttcggaagttcaaatcgaagccaatgttaccttgaaagggcaaacgaaaattggtgctgagactgttttgacaaacggtacttatgtagtggacagcactatcggagcaggagcggtcattaccaattctatgattgaggaaagtagtgttgcagacggtgtgatagtcggtccttatgctcacattcgtccaaattcaagtctgggtgcccaagttcatattggtaactttgttgaggtgaaaggatcttcaatcggtgagaataccaaggctggtcatttgacttatatcggaaactgtgaagtgggaagcaacgttaatttcggtgctggaactattacagtcaactatgacggcaaaaacaaatacaagacagtcattggaaacaatgtctttgttggttcaaattcaaccattattgcaccagtagaacttggtgacaattccctcgttggtgctggttcaactattactaaagacgtgccagcagatgctattgctattggtcgcggtcgtcagatcaataaagacgaatatgcaacacgtcttcctcatcatcctaagaaccagtaggagcctatcatggagtttgaagaaaaaacgcttagccgaaaagaaatctatcaaggaccaatatttaaactggtccaagatcaggttgaattaccagaaggcaagggaactgcccaacgggatttgattttccacaatggggctgtctgtgttttagcagtaacggatgaacaaaaacttatcttggtcaagcagtaccgcaaagctatcgaggctgtctcttacgaaattccagccggaaaattggaagtaggagaaaacacagcccctgtggcagctgcccttcgtgaattagaggaagaaacagcctatacagggaaattagaactcttgtacgatttttattcagctattggcttttgtaatgagaagttaaaactatatttagcaagcgatttgacaaaagtggaaaatccgcgtccgcaggatgaggatgaaaccttggaagtccttgaagtgagcttagaagaagcgaaagaattaatccaatcaggtcatatctgtgatgccaagacaattatggctgttcagtattgggagttgcagaaaaaatagaggaggtcagtatgggtaaatctttattaacggatgaaatgattgaaagagctaatagaggcgaaaaaatttcaggtcctcctttgctagatgataatgaggaaactaagattttaccaacctcttcttcccgttttggttatgccaatcctaaggatcatggttttagccaggaaaccttgaagattcaggtcgaaccatctattcataaaagccgtcgtattgaaaataccaagagaaatgtcttcaattctaagttgaataaaatcttatttgcggtcatctttctcttgattttgcttgttttagcaatgaaacttttgtaatagaaaaggaattgaaatgaaaataggaattattgctgctatgccagaagaactggcttatctggtccagcatttagataatgcccaggagcaagttgtttttgggaatacctatcatacaggaaccattgcttctcatgaagtcgttcttgtagaaagtggaattggtaaggtcatgtctgctatgagtgtggcgattttggctgatcatttccaggtggatgcccttattaatacgggttcagctggggcagtagcagaaggtatcgctgttggggatgtcgtgattgctgacaaattagcctatcatgacgtggatgtcacagcttttggctatgcttatggacaaatggcgcaacaaccgctttatttcgaatcagacaaaacctttgttgctcaaatccaaaagagtttatctcaattggaccaaaactggcatcttggtttgattgctacaggagatagttttgttgcaggaaatgacaagatagaagcgattaagtcccatttcccagaagttttagccgtggagatggagggggcagctattgctcaagcagcgcatgccctcaatctcccagtcttagtcatccgagctatgagtgacaatgccaaccatgaagcaaacatcttttttgatgagtttattatcgaagctggacgtcgctctgcccaagtcttgttgacctttttgaaggctttagattaagcggaaatttgacagtttttctagcttatgataagatttaagtaaagaaaagctagaaaacgtttcagaggatattatgagtattgaaatgaccgtcagtgagattgcagaggtcttaggattatctcgccaagcaatcaataaccgtgtcaaagaattaccagaagaagacacagataaaaatgacaaaggggtaacagttgttaccagaagtggcttgattaagctagaagaaatctataaaaaaacgatttttgaagatgagcctgtcagtgaagatgtcaaacaacgtgaactgatggagattctagtggatgagaagaatgcagaaattcttcgtctttatgaacaattaaaagccaaggatcgtcagttatcagaaaaagacgagcagatgcgtatcaaagaccgtcagattgctgagaaagacaaacaattagatcagcaacaacaattgacccttcaagccatgaaggatcaagaaaatcttaagctagagctggaccaagcaaaagaagaagtccaatccactaaaaaaggcttttttgctcgtttatttggaggataatcaaggagctgtttaggttaaatgctaacctgatggcttcttttgtttgtgaatagtatagttgattagaacagagacagtagaggagaggtacagaatggaacgattagaagattacattgcttttgatttagaatttaatcagcacgaaggacaaacacacttgattcaagtatcggcagtgcgttttagagatggtcgggaaatcgatgcctatgattcctatgttcataccagcgtccctctaaaaagctttatcaatggtttgaccgggattacagctgagaccttaaaagatgctcctccagttgagaaagtcttagaagaattccaagagtttgtgggttctttgctgatgataggctacaatgctgctaaaagtgatttacctattttagcagagcatggtttagactatagccaacagtacaaggtggatttgtatgatgaagcttttgaacgtcggagttcagatttacatggtattgccaatctcaaattgcaaactgttgcctcatttcttggatttcaaggtcagtctcataatagtttagaggatgctcggatgacggcgcgtgtttacgaatccttcttagagtcggatcaagctagggaattgttagagacagaaagtagcttatcaaacaatccttttggtggcttggacttgtctcaattatttgactaggagtgcctatgaaacctgaaaaacctaaaaaattgggtcttaaacagatttacctcgatcttgataaaatcctctttctatttttcttgatttttatgatagtggagtatttgtgggtaccattcaattcatggttggctagcttcttattagatcagacaggttatctttttatttcctataacaatgtcttagccatccttactcattctccattgattagtctagcttttttagccttgattgtaattaaccttctggttgcttattttcaaataggactcctctttattggtgctcgtcatctcctctataatgaaaagcgaaggctaattgagtatatccgcaaggttttccatgaaagttttggatttatgaaaaagctaacttgcgctaaagccttgtttatctttttctatatagctatgctgtttccttttatacggaaaatgctgaagatttattatcttaataaaatcgtcattccagagtttatccaagcttatttagaagatagatattggatgtggtggctgagcatcctacttctatctcttatctttctctatgtctctgtcagattgatgtttgcccttccgaagattgtatatgatcagctgactgttcgagaagcagtgatgtttagcttggagaaaaccaagaagagagttactttttatgcttggaatttattttacatcttgctcaaagcacatttattattttatcttcctttgattcctttattattggctcaaactttggtagatgatatcactcagagagagtctctgattcttggtattttgaattttgtcgtgattaaaaatctctattatatggctctgacttattttttggttaaatttgtttcatttttgacaggaaaggagctggatatgcttcctaggagagaaaaagatcacatcgtgcgatggggtgtcatgacttgtgccagtcttttctttgccttagaaggttatatttatctggaggctcccatggttcatctacctcaacttatttctcaccgaggggtttccaatgcaaatgggattcaaaatacagtagagtccttggaaactacagcacaactcaaaccagacttggtggagacggacgtgcaggaaacaaaagatgggcagtttgtcatgatgcatgatgctaacttgaaaaatctagcaggtatcaataaaagtcctcaagacttaaacttggaggagcttaaagggattgatatttttgaaaatggctaccagactaaaatttcaagctttgaagattatctcagtcgagccaacgaacttggtcaaaaattactaattgaaattaaaaccagtaaaaaagatagtccagacatgatgaaccgctttttagcccgttatgctgcaaagctcaagatttatggacatcaaatccagtctttagactaccatgttgtcgaaaaagtaagacagtatgatgccgaactaccagtttatttcatcatgccctacaattctgtctttcctaaaacaagagcgacaggatatactatggagtactcaaccttggatgaatattttgtaagcaaactatggacaacggatcagaaactttatgtctggactgtcaatgattcagaagctatcagcaaatctcttcacttaggagtagatggagtgattacagatgatttggaaaaagttcagcgggaaatagaagtagcccaagaagatccagaatatacggatttgctcttgaaaaaagcattggaattctttgaattttagtaataaaaaagaggaacggttgttcctcccatgataggtaagtattcttgtgaatgcttgcttttttgtggttgcaatccgtttacgagaattgtttgtattgttcttgtttcaatttactttatagtgctttgaagttggaatgctacactataacttataaaatatagtaaaatgaaccaaaaatagtacacaatgtggtataatcttcttatggcatattcaatagattttcgtaaaaaagttctctcttattgtgagcgaataggtagtataacagaagcatcacacgttttccaaatctcacgtaataccatttatggctggttaaagctaaaagagaaaacaggagagctaaaccaccaagtaaaaggaacaaaaccaagaaaagttgatagagatagacttaaaaactatcttactgacaatccagatgcttatttgactgaaatagcttctgactttggctgtcatccaactaccatccactatgcgctcaaagctatgggctacactcgaaaaaaagaaccacacctactatgaacaagacccagaaaaagtagccttatttcttaagaattttaatagtttaaagcacctagcacctgtttagattgacgaaacaggattcgatacttatttttatcgagaatatggtcgctcattaaaaggtcagttaataagaggcaaagtatctggaagaagatatcagaggatttctttggttgcaggtctaacaaatggtgaattaatcgctccaatgacttacgaagagacgatgacgagcgacttttttgaagcttggtttcagaagtttctcttaccaacattaaccacaccatcggttattatagtaaaatgaaataagaataggacaaatcgatcaggacagtaaaatcgaattctaacaatgttttagaagtccatatgtactattctagtttcaatataccataactgttcctagtcaacctgcaagccctgtcccagctccaagctcagctccgactcaagatcctagagtggtagcaagcgcttcggctagctcaacgagcacacaagctcaagagcaagttgacaagtctgaacttcgtgccttgagtcaagagttagaccaacgcttgaaagctttggcaacagtatctgatccgaaaatcgatgcaaccaaggctgtcctcctagatgctcaaaaagctccggaagatagtgccttgacagagtaaggtctgcatactgcagtagagtctgtgaaggctgggctgccttggactctctcaaagatgtgaaagcaaatgctagcgacagcaagcctgcacaggacaagaaggatgcaaaacaaggaacggaagatagtaaggattcagataagatgactgaaacaaactcagttccggcaggagtgattgtggtcagtctacttgccctcctaggcgtgattgccttctggctgattcgccgtaagaaagagtcagaaatccagcaattaagcacggaattgatcaaggttctaggacagctagatgcagaaaaagcggataaaaaagtccttgccaaagcccaaaaccttctccaagaaacccttgatttcgtgaaagaagaaaatggctcagcagagacagaaactaaactagtagaggagcttaaagcaatccttgacaaactcaagtaaaacatgatttatgaaatgtcagacctaaaagacattttcgttcacaaaagcagcgatgagtaatccttgtcgttgctttttggctattttgggggataagatccgccttgactagcaaaagaaaagattggtccaatagtgcccgatacgattttgcgtagcagaaagcttacaaataaaattgaatatagtaaaataggattagaattattaagaaagttggttctttattggaaacgatagtatttttaatctctgtttttctagcaggtgttttatcctttttttctccttgtatttttcctcttctgccagtctatgctgggattttattggatgatcaagaaagtgcaaaaagcttttctttgtttgggagaaaggttctctggtcaggcttgattcgaacactttgctttatcgctggtatctctctcattttctttattctaggctttggtgctggttactttggtcatattctctatgcaaattggtttcgatatggcatgggagctattattatcattttgggtcttcaccagatggaaatttttcatttgaagaaattagaagttcaaaaaagttttacctttaaaaaatcagattctaatcgttattggtcagcttttttacttggtattacctttagctttggttggacaccttgtattggtccagttttaagttctgttttagcacttgcggcttctggaggcaatggcgcttggcaaggagcgatttatactctcatttacactctgggcatggcccttcctttcttggtattggcactagcttcaggtctagtcatgccatattttagtaaaatcaagcgtcatatgatgctactaaagaaaattggtggtttcctcattgttttaatgggaattttgttactattaggacaagtaaatgttctagctggaatttttgaataaaggaggacaaatgaaaaaagtaatgtttgctggcttaagtctcttgtcattagttgtattgatggcctgtggtgaggaagaaactaaaaagactcaagcagcacaacagccaaaacaacaaacgactgtacaacaaattgctgttggaaaagatgctccagacttcacattgcaatccatggatggcaaagaagttaagttatctgattttaagggtaaaaaggtttacttgaagttttgggcttcatggtgtggtccatgcaagaaaagtatgccagagttgatggaactagcggcgaaaccagatcgtgatttcgaaattcttactgtcattgcaccaggaattcaaggtgaaaaaactgttgagcaattcccacaatggttccaggaacaaggatataaggatatcccagttctttatgataccaaagcaaccaccttccaagcttatcaaattcgaagcattcctacagaatatttaattgatagccaaggaaagattggaaagattcaatttggtgctatcagtaatgcggatgcagaagcagcatttaaagaaatgaactagaatcgataaaatctgattacaagatgtagtcagattttggtaacttctaaaactaacttccagtttcccacaacctagcttttagtatgagaaaaacgcgtgacatcagtggaaatccgtcttagactaacttccactggttttctttttcttgatatataagggttcaaaagcgaaaagactcagaaaaagtgcacgacaaatagccctaaaacagagtcgtcttagagtaacttccagttttgggagagagatggaagttactttgagaagttacggtagtcagatttttttagaaaaacattttataaatattcacatatctcctatatttatggtaaaatagaattatcagtttattttggagtcaaagatgaatatatttagaacaaagaatgttagtttagataaaacagagatgcataggcatttgaagttatgggatttgattttgctgggtatcggagccatggtagggacaggcgtctttacaatcacaggtactgcagctgcaacacttgctggcccagccctagtgatttcaatcgttatttctgccttgtgtgtgggattatcagccctcttttttgcagaatttgcctcgcgagtacccgctacaggaggtgcctatagttacctctatgctatcttaggagaattccctgcctggttggctggttggttaaccatgatggagttcatgacagccatatcaggcgtagcttcgggttgggcagcttattttaaaggcttgctctctcaatacgggatagcctttcctcaggctttaaatggtacctttaatcctcaagcagggacatttgttgatttattgcctattcttgtcttggtcttggtgacttcgcttgttttactaaatgccaaggcagccttacgctttaattcgattctagttattttgaaattttccgctttagctctctttgttttagtaggaatttggaatattaagtttgataattggagcaattttgctccttacggttttggacaaatctatggagctagcactggtattatggctggtgcgtccttgatgttcttcggttttttgggatttgaatccatctctatggctgtagatgaagtcaagactcctcaaaaaaatattcctagagggattgtcttatcgctttctatcgtaaccattctctatgccttggtgacccttgttttgactggtgtggttcactatagtcatttaaatgtcgatgatgccgttgcctttgcccttcgtagtgttgggattagttgggcagccaactatgtgtcattagtggctatcttgaccttgattacagtttgtatttcgatgacctatgccctatcgcgtatgatttacagtttagcacgtgacggcttagtgcctgctgcctttaaggaactgacgaagactagcaagataccaaagaatgctactatcttgacaggtctagcttcagcagtagcagcaggaatgttcccactagccagtattgcagcctttttaaatatttgtaccttagcctacttgatcatgttggcttatggtctgattcgcttacggaaagaaaaaggaatgcccaaagctggggaatttaaaacaccattggtacctctgttaccaattttatcgatcatcatttgtttatccttcatgttacagtataatatgaatacctggattgctttcctagttgcgttgttagtaggaagtattatttacttcacttatggctataagcattctaccatagaagaataaagtgaaagtctattgagttgttgacactcagtagatttttatatgtgaaagaaatttcaaattttttctaaaaatatcttgacagattaaattttcaggagtagaatatttactagttaattaaatggttaaggagttgttcatgaagaaacaaaatttatttttagtcctgttaagtgtctttcttttgtgcttgggggcttgtggtcaaaaggaaagtcagacaggaaaggggatgaaaattgtgaccagtttttatcctatctacgctatggttaaggaagtatctggtgacttgaatgatgttcggatgattcagtcaagtagtggtattcactcctttgaaccttcggcaaatgatatcgcagccatctatgatgcagatgtctttgtttaccattctcatacactcgaatcttgggcaggaagtctggatccaaatctaaaaaaatccaaagtgaaggtcttagaggcttctgagggaatgaccttggaacgtgtccctggactagaggatgtggaagcaggggatggagttgatgaaaaaacgctctatgaccctcacacatggctagatcctgaaaaagctggagaagaagcccaaattatcgctgataaactttcagaggtggatagtgagcataaagagacttatcaaaaaaatgcgcaagcctttatcaaaaaagctcaggaattgactaagaaattccaaccaaaatttgaaaaagcgactcagaaaacatttgtaacacaacatacagccttttcttatctagcgaagagatttgggcttaatcaacttggtattgcaggtatctctcctgaacaagaaccaagtccacgacaactaacagaaattcaggaatttgttaagacctataaggttaaaacgatttttacagaaagtaacgcttcttcaaaagtagctgaaactcttgtcaaatcaacaggtgtgggtcttaaaactctgaatcctttagagtcagacccacaaaatgacaagacctatttagaaaatcttgaagaaaatatgagtattctagcagaagaattaaagtgaggaaagaatgaaaattaataaaaaatatctagcaggttcagtggcagtccttgccctaagtgtttgttcctatgaacttggtcgtcaccaagctggtcaggttaagaaagagtctaatcgagtttcttatatagatggtgatcaggctggtcaaaaggcagaaaacttgacaccagatgaagtcagtaagagggaggggatcaacgccgaacaaatcgtcatcaagattacggatcaaggttatgtgacctctcatggagaccattatcattactataatggcaaggtcccttatgatgccatcatcagtgaagagctcctcatgaaagatccgaattatcagttgaaggattcagacattgtcaatgaaatcaagggtggttatgttatcaaggtagatggaaaatactatgtttaccttaaggatgcagctcatgcggataatattcggacaaaagaagagattaaacgtcagaagcaggaacacagtcataatcacgggggtggttctaacgatcaagcagtagttgcagccagagcccaaggacgctatacaacggatgatggttatatcttcaatgcatctgatatcattgaggacacgggtgatgcttatatcgttcctcacggcgaccattaccattacattcctaagaatgagttatcagctagcgagttagctgctgcagaagcctattggaatgggaagcagggatctcgtccttcttcaagttctagttataatgcaaatccagctcaaccaagattgtcagagaaccacaatctgactgtcactccaacttatcatcaaaatcaaggggaaaacatttcaagccttttacgtgaattgtatgctaaacccttatcagaacgccatgtggaatctgatggccttattttcgacccagcgcaaatcacaagtcgaaccgccagaggtgtagctgtccctcatggtaaccattaccactttatcccttatgaacaaatgtctgaattggaaaaacgaattgctcgtattattccccttcgttatcgttcaaaccattgggtaccagattcaagaccagaacaaccaagtccacaatcgactccggaacctagtccaagtccgcaacctgcaccaaatcctcaaccagctccaagcaatccaattgatgagaaattggtcaaagaagctgttcgaaaagtaggcgatggttatgtctttgaggagaatggagtttctcgttatatcccagccaaggatctttcagcagaaacagcagcaggcattgatagcaaactggccaagcaggaaagtttatctcataagctaggagctaagaaaactgacctcccatctagtgatcgagaattttacaataaggcttatgacttactagcaagaattcaccaagatttacttgataataaaggtcgacaagttgattttgaggctttggataacctgttggaacgactcaaggatgtcccaagtgataaagtcaagttagtggatgatattcttgccttcttagctccgattcgtcatccagaacgtttaggaaaaccaaatgcgcaaattacctacactgatgatgagattcaagtagccaagttggcaggcaagtacacaacagaagacggttatatctttgatcctcgtgatataaccagtgatgagggggatgcctatgtaactccacatatgacccatagccactggattaaaaaagatagtttgtctgaagctgagagagcggcagcccaggcttatgctaaagagaaaggtttgacccctccttcgacagaccatcaggattcaggaaatactgaggcaaaaggagcagaagctatctacaaccgcgtgaaagcagctaagaaggtgccacttgatcgtatgccttacaatcttcaatatactgtagaagtcaaaaacggtagtttaatcatacctcattatgaccattaccataacatcaaatttgagtggtttgacgaaggcctttatgaggcacctaaggggtatactcttgaggatcttttggcgactgtcaagtactatgtcgaacatccaaacgaacgtccgcattcagataatggttttggtaacgctagcgaccatgttcgtaaaaataaggtagaccaagacagtaaacctgatgaagataaggaacatgatgaagtaagtgagccaactcaccctgaatctgatgaaaaagagaatcacgctggtttaaatccttcagcagataatctttataaaccaagcactgatacggaagagacagaggaagaagctgaagataccacagatgaggctgaaattcctcaagtagagaattctgttattaacgctaagatagcagatgcggaggccttgctagaaaaagtaacagatcctagtattagacaaaatgctatggagacattgactggtctaaaaagtagtcttcttctcggaacgaaagataataacactatttcagcagaagtagatagtctcttggctttgttaaaagaaagtcaaccggctcctatacagtagtaaaatgaatggagcatattttatggagaagtaacctttcgtgttacttctcttttttagaaaaacgtaacagaaacttgacaaaagtaattttaaatagtaaactatttactggttaattaaatggttaaataaccggtttagaaaactatttaataaagtaaaagaagttgagaaaaaacttcatcatttattgaaatgagggatttatgaaatttagtaaaaaatatatagcagctggatcagctgttatcgtatccttgagtctatgtgcctatgcactaaaccagcatcgttcgcaggaaaataaggacaataatcgtgtctcttatgtggatggcagccagtcaagtcagaaaagtgaaaacttgacaccagaccaggttagccagaaagaaggaattcaggctgagcaaattgtaatcaaaattacagatcagggctatgtaacgtcacacggtgaccactatcattactataatgggaaagttccttatgatgccctctttagtgaagaactcttgatgaaggatccaaactatcaacttaaagacgctgatattgtcaatgaagtcaagggtggttatatcatcaaggtcgatggaaaatattatgtctacctgaaagatgcagctcatgctgataatgttcgaactaaagatgaaatcaatcgtcaaaaacaagaacatgtcaaagataatgagaaggttaactctaatgttgctgtagcaaggtctcagggacgatatacgacaaatgatggttatgtctttaatccagctgatattatcgaagatacgggtaatgcttatatcgttcctcatggaggtcactatcactacattcccaaaagcgatttatctgctagtgaattagcagcagctaaagcacatctggctggaaaaaatatgcaaccgagtcagttaagctattcttcaacagctagtgacaataacacgcaatctgtagcaaaaggatcaactagcaagccagcaaataaatctgaaaatctccagagtcttttgaaggaactctatgattcacctagcgcccaacgttacagtgaatcagatggcctggtctttgaccctgctaagattatcagtcgtacaccaaatggagttgcgattccgcatggcgaccattaccactttattccttacagcaagctttctgccttagaagaaaagattgccagaatggtgcctatcagtggaactggttctacagtttctacaaatgcaaaacctaatgaagtagtgtctagtctaggcagtctttcaagcaatccttcttctttaacgacaagtaaggagctctcttcagcatctgatggttatatttttaatccaaaagatatcgttgaagaaacggctacagcttatattgtaagacatggtgatcatttccattacattccaaaatcaaatcaaattgggcaaccgactcttccaaacaatagtctagcaacaccttctccatctcttccaatcaatccaggaacttcacatgagaaacatgaagaagatggatacggatttgatgctaatcgtattatcgctgaagatgaatcaggttttgtcatgagtcacggagaccacaatcattatttcttcaagaaggacttgacagaagagcaaattaaggctgcgcaaaaacatttagaggaagttaaaactagtcataatggattagattctttgtcatctcatgaacaggattatccaagtaatgccaaagaaatgaaagatttagataaaaaaatcgaagaaaaaattgctggcattatgaaacaatatggtgtcaaacgtgaaagtattgtcgtgaataaagaaaaaaatgcgattatttatccgcatggagatcaccatcatgcagatccgattgatgaacataaaccggttggaattggtcattctcacagtaactatgaactgtttaaacccgaagaaggagttgctaaaaaagaagggaataaagtttatactggagaagaattaacgaatgttgttaatttgttaaaaaatagtacgtttaataatcaaaactttactctagccaatggtcaaaaacgcgtttcttttagttttccgcctgaattggagaaaaaattaggtatcaatatgctagtaaaattaataacaccagatggaaaagtattggagaaagtatctggtaaagtatttggagaaggagtagggaatattgcaaactttgaattagatcaaccttatttaccaggacaaacatttaagtatactatcgcttcaaaagattatccagaagtaagttatgatggtacatttacagttccaacctctttagcttacaaaatggccagtcaaacgattttctatcctttccatgcaggggatacttatttaagagtgaaccctcaatttgcagtgcctaaaggaactgatgctttagtcagagtgtttgatgaatttcatggaaatgcttatttagaaaataactataaagttggtgaaatcaaattaccgattccgaaattaaaccaaggaacaaccagaacggccggaaataaaattcctgtaaccttcatggcaaatgcttatttggacaatcaatcgacttatattgtggaagtacctatcttggaaaaagaaaatcaaactgataaaccaagtattctaccacaatttaaaaggaataaagcacaagaaaacttaaaacttgatgaaaaggtagaagaaccaaagactagtgagaaggtagaaaaagaaaaactttctgaaactgggaatagtactagtaattcaacgttagaagaagttcctacagtggatcctgtacaagaaaaagtagcaaaatttgctgaaagttatgggatgaagctagaaaatgtcttgtttaatatggacggaacaattgaattatatttaccatcgggagaagtcattaaaaagaatatggcagattttacaggagaagcacctcaaggaaatggtgaaaataaaccatctgaaaatggaaaagtatctactggaacagttgagaaccaaccaacagaaaataaaccagcagattctttaccagaggcaccaaacgaaaaacctgtaaaaccagaaaactcaacggataatggaatgttgaatccagaagggaatgtggggagtgaccctatgttagatccagcattagaggaagctccagcagtagatcctgtacaagaaaaattagaaaaatttacagctagttacggattaggcttagatagtgttatattcaatatggatggaacgattgaattaagattgccaagtggagaagtgataaaaaagaatttatctgatctcatagcgtaaggaatagcagtagaaaaagtctgaatcaaaaatgaagttctctcaaaagttagaaataaaactctgactttgggagaatttcattttattattaatatataaaatttcttgacatacaacttaaaaagaggtggaatatttactagttaattaattggttaattaatttatttaatcatttaataatgaagacatcatataaataattatagaaatgaggtaattatgaaatttaaaaagaaatatatagcagctggatctgttgttatcctttccttaagtctgtgtgtttatgctctgaaccaacatagctaacaggccaatacagataaaaatcgtgtttcatatgtaaacagtaataaagacactaagaagactgaaaatttgactccagactaggttagtcaaaaagaaggaattcaagcaaaacaaattgttattaagattacagatcaaggttatgtaacttctcatggcgatcattatcactactataatggtaaagttccttttgatgcgctctttagtgaagagctattaatgaaagcccccaactatcagccgaaagatcaagatatcgtcagttaggttaagggaggatatattattaaggtagatggaaagtattatgtttaccttaaagatcaagctcatgcagaaaatgtacgaacaaaagatgaaatcaatcgccaaaaacaagaacatggtaaagacgataaaggagctagtgcagaagtatctgtagcaaaattacagggacgttatactaccgatgatggttatatatagtgagttgaatttagaatagcacatcatagtttctaaatcattgttagaaattactttaaaatccccttatcaatttgctcatattctatttcaatctactatagtaccacatggtggtcactatcatttcattcctgagagtgacttgtcggcaggtgaattagcagccacatatgtctttaaccctaatgatattgtcagagatacaggtgatgcttatatagtaagacatggggatcactatcactatattcctaagtcatctcttaacaatcccccatcacactctaacacggaagaggtaggaagttcttctagttctgtattaagtaatccgtcactacatgtccatcatgaggaagaagatggtcatggttttgatgccaatcgaattataagtgaagattcagaaggttttgtgattcctcatggcgaccacaatcactacatcaaggttcaaactaagggatatgaagcggctttgaaaaacaagattccatccctgcaatccaactatcaacctggaacttttgatgagaaggcagtcttggcaaaagtagatcaacttctagctgatagcagaagcatctacaaagacagattgagttagctttaggtcagtttactgaaagtttgaaaaaaataaaagttagttgattgattacttctctaaattttgggcacactaaaaagaggtcttgacacctaaactttaaaattaaagcatattgaatccgtgctgctgtgcgaagcgaatagcgtcttggacgaacattgtcttatctggatttcttatttctgtaaggccttgtaatcttggattataactctcctgttttaggagtacatggtagatagcaaccaataatctgcgacagatagcaaggaagaagtagaaagtcttttgagcaaggcaaatcaactcttggaacaaatccatgaagaaggaatcagacaatccttggcagaagaagtagaaaatctaaaagctgccacaaacaaggctgatgcagacttggatgaagtaaacagtcaggtaaaagatgtcttgactcgtatcgctagcgcccttcaacaagaaaaggaaaatgctgagcaagatcctcagacacttgtactctatcaaaaactctacgatattctcatgtcgcttcactcttatttagaaagtaataatggatctgatgcggactttgataaggtggatgcattattagatcaactttctgctaagagtaaagacaaaacagctttacttgaatcgacaaaagctattctagttttgaatcatcaaatccagtcaaaagctagcgcaagtgaagaaacaagtccagcaagaaatgctgaagcaaatggtgataacaccagtgctgagaaccaaccaaacgcaactgcagaatctaacattgaaactgctagcgacgaaaacaaaccaagcaatacaagagattctaaacctgctgaatcaacttcagaaaatgaaacaacagaatcttctacaactactggaaatcaagaaaaaccagtagaataaaaagaaaggcgaagtagctgagctacctcgtctttttagcctttataagctacgatgccaatgatggtatcaactgcacgttccatagtctgaaggctaacgtattcaaaacgtccgtgcatattttcgccacctgcaaagatattcggagttgggattcccataaaggaaatcttagagccgtctgttccaccccggattggttcgataataggcgtgatacctagatcttccataacggctttagcaatggtaattggagtcatatctttttcaatgacttctttcatattgtagtactggtctgtcaagttgagagtgacacggtcgctcccaagttcttcattcatcttatcagcgatagattgcatggatgctttacgcgcttcaaaggcatctttttcaaaatcacgaatgatgtagcttgcacgcgcctcctcaacactacctgtcacatccattagatggtaaaaaccttggtaaccttcagttaactcaggtcggtcattttctggaagttgattatgaaaatcaattgctagctgaagggcattgaccatctgccctttggcagtaccagggtggacattacgaccttggaaatgcaattcagcaccagcggctgagaaagtctcgtactgaagttcacctagtggaccaccatcaacagtgtaggcaaaatccacatcaaaatcttctgcatcaaatttattggcaccaacaccgatttcttcatctggaccaaaaccaacacgaatctcacagtgcttaatttcaggatgagcagttagatattcaatggctgtcataatttcagcaattcctgacttgtcatcagcacctagcaaggttgttccatctgttgtgatgagcgtttgtcctggatatttttcaagactcttgaagtcagctggatcgagtttgaaaccagaattccctagttcaatcacaccaccatcgtagttttcaattacctgtggattgactccttcagcattaaaatcagcagtatccatgtgcgatataaaaccaatcttacgtgttaaagacggatcgttggctggcaaggttccaatagcaaaaccattcggtagatagtaaacattttgcagtccaacacgtttcatttcaggaattaggacatttgttgcgaagtcaacctgactctgtgtacttggagtagtagtagagtgttcatcagagcgcgtgttgaccttaacataggttaagaagcggtccaagagatttggataagtcataaaaaaactccttttgaatttattttttccattgtatcatagaaagaagagaaaaacaaaagacagaagattgagaatgtccctatgctagcgtttacttatcgatgaattaatgataaaataaacttgataaaaacatcacaaggaagcagtcatgaaaaaagcaattttaatgatgaccttcggttcaccagaagagattatctttgaaggtgtagctgattttttcacaaatattcgtcgtggggtgagaccccaagaccacgagattcagactctttatgataattatgtacgaattggaggcacgcctctgcaaaaaattacccgtcaagaggttgccttggtagaagctaggctggggagtgaatacagtgtctactttgctaataagttttccagtccctttattccagatgtgatcggtcaaatggaagcagacggaattgaacagtgtatttgcttgattttggagccccattattctttctactctgtcatgggctatgaaaaatttttagaaagcaaacaaattcaatttttggtcattaaggactggtatcaggaagaagcgctcttaaactattgggcagatgaaattgctaagattttaaaagaagaagtaaagcaagacagctttaaagtcatcttttcagcccatagtgtgcctatttttgccttggactttggtgatccttatatagaccaaattttcgaaaatagcaagctagtcgctgaaaaactgggcttgagttcagaacaatataccaacacttggcaaagtgagagtgatattggtattccatggattaaaccagatgttttggagtatctcagagaacagacagaacatccagaccattatatttttgtacctattagtttcatcagtgagcatattgaggtcttgtttgacaatgatgtggaatgttatgacttatgtcaggaatttggggtaaactaccatcgtccaccaatgccaaatacagattctcgtttgattgatgctttggtcaatacagttagagtcaatgaaaatcaagagtttaaggaatttctcccagaagaagagacctttgatgagttagttccttcagacgagacgaaaaacattttggctgaatctcaagatttacaaatgccagaatttgtgaaaaaattgattgagaaaaaaggtcgtgaaaatgttaagatgccttatcttatcaaaaaaatgcttgaaaaagcaggcaagttacccaaagagtaaagaaaaaaggatttagctttgcgctagatccttttaatcgattattttttctcaaggagagcttttatttcttgaaggacttccaattcggttggttttttttcgtcagttttttcttcctttatgccagtcagcttctgtgctttttcaatgcccttgataataaagaagagggcggtacccacaaagataaaattgataatagcacttaagaagttaccatagccgactccatgccaagaaagttgagcgatacgttcaactttagcagctttcaaagcgggatttaaaataagaggagtgataatgtcgtttacaagtgaagtaacgatagcaccaaaagcagaggcaattacaacaccgacagcaaggtcaataacatttcctcgaagcaagaacgattttagattttttaacatactgttttcctttcaatgtttcgtgtttcattgtatcctaaatcattatagaaggcaattaaaaggctcataaatggagcattattttctaaaaatatagaccttgctcaagatataattgatgataataatgaatatttgtgcaattattgtttcaatagcatttatcttatcaatgttttcagttacgaattgccctatgatgtgaggaaattgggttacaaagagaaaagttaaaaacaagtctaacagaaaagtagaaaggcgggcaagagaaaatttcactaaacggataagtctatttttctttttttgcttaaatacaatcgtatcatttgtgataaaggcaaataggataccgataatatttgccaaggccgtagcaaggagttcctgatgacttagctgataaatgactaatcgtgatagtatagcaacaagagtagtcactataccaaaaaagagataggctaagatttcattgttaaaaaatttttgaataggttttttcatgctttaagtatagcataaagcaggctattgtgctatactagtaaggttgaatgaatcaacccttggtgcttagcttctttcaccaagcatattacacgcggataaccgccaaaggagaaaagatgaaaaaattaactattcgtgatgttgcagatattgcaatcgtcgctgctatctacgtcgttttgactgtcacaccgcccctaaatgccatcagctatggtgcttatcagtttcgtatttcagaaatgatgaactttatggctttttacaatcctaagtacatcatcggagttaccatcggttgtatgattgctaatttctttagcttcggactgctagatgtctttgttggtggtggttcaaccttagtattcctcagtttaggtgtttggctttttgcaaaatatagcaaggattacctctttaacggattgattcgaaaagatcatttcttcttttcaatcctcttttcaatttccatgtttactatcgctgcagagttaaatattgtagcagaattaccattcttccttacttggtttacaacaggaatcggtgaatttgcttcattgattattggagcgattattattggtaaaattggtcgtcgaattgatttaagtaaatagaagaagataagctaggtagtttttacctggctttttcctatggaaaatttctaaggaaacttgacaagtttttctgaatatagtatacttcttaagtaagctgatttagctcagttggcagagcgcatccatggtaaggatgaggtcgccggttcaatcccggcaattagcatgatatgtatagggaaactcttgaatacgagagttttttgttatactcgatctgaaaaatttcttattgacaaaatcaagtatctctagtaatatagaatatgcgatgagtcgataggtagtcttcggactactattgagcatgaggaggtcataacgcaggagcggaccttgatgagttgtgtgaacctgctcatcacatgaagatgcctcttagtccctagtctagcgactgggatttttattttccaaaaaatgatgaaaaagctttgcaattcatggaaaaagtagtataatacttctattatagaaatttttagaaaattccgaaagaggttatttatgggatatacagttgctgtagtcggcgcgacaggtgctgtcggtgctcagatgataaaaatgttggaagaatcaacacttccaatcgataaaattcgttaccttgcttctgcacgttcagcaggtaagtcattgaaatttaaagatcaagatattacaattgaagaaacgactgaaacagcttttgaaggagttgatattgctctcttttcagcaggtagttctacatcagctaagtatgcaccatacgcagtaaaagctggcgtggtagtagtagataatacatcttatttccgtcaaaatccagatgttcctttggttgttccagaggtcaatgctcatgcacttgatgctcacaacggaatcattgcctgccctaattgttcaacaattcaaatgatggtggctcttgagccggttcgccaaaaatggggcttggaccgtatcattgtttcaacttatcaagccgtttcaggtgctggtatgggagcaattcttgagacacaacgtgaacttcgtgaagtcttgaatgatggtgtgaaaccacgtgatttgcatgcggaaatcttgccttcaggtggtgacaagaaacattatcctatcgcctttaacgctcttccacaaattgatgttttcactgataatgattacacgtacgaagagatgaagatgaccaaggaaactaagaaaattatggaagatgatagcattgcagtatctgcaacatgtgtgcgtattccagtcttgtcagctcactctgagtctgtttatatcgaaacaaaagaagtggctccaatcgaagaagtaaaagcagctatcgcagccttcccaggtgctgttcttgaagatgatgtagctcatcaaatctatcctcaagctatcaatgcagttggttcgcgtgatacctttgttggtcgtatccgtaaagacttggatgcagaaaaaggaattcacatgtgggttgtttcagataaccttctcaaaggtgctgcttggaactcagttcagattgctgaaactcttcatgaacgtggattggttcgtccaacagccgaattgaaatttgaattaaaatagtcatatcgtttaggagttcagatgaactccttctttgaaatagagaggtgttttcgtgtcttatcaagatttaaaaaaatgtaaaatcattacagcctttattacccccttccatgaggatggttccattaactttgatgctattccagccttgattgagcatttattggcccatcatacggatggaattcttctcgcaggaacgactgctgagagtccaactttgacccacgatgaggagttggagttgtttgcggctgtacaaaaggttgtcaatggacgcgttcctttgattgcgggtgtaggtactaatgatacgcgtgactctattgagtttgtcaaagaagtagcggaatttggtggtttcgcagctgggcttgctattgttccttactacaacaaaccttctcaagaagggatgtatcagcactttaagactattgcagatgcttctgacctaccaattattatctataacattccagggcgtgtagttgtcgaattgactccagaaaccatgcttcgcttggctgaccatccaaatattatcggtgtcaaagaatgtactagcttggctaatatggcttacttgattgagcacaagcctgaagagttcttgatttatacaggtgaggatggagatgctttccatgccatgaaccttggggcggatggggttatttctgttgcctctcatacaaatggggatgaaatgcacgagatgtttactgcgattgcagaaagcgatatgaagaaagccgcagcaattcagcgtaaattcattcctaaggttaatgctctcttctcttatccaagtcctgctccagttaaggcaattcttaactatatgggatttgaagctggacccactcgtctacctcttgttccagcaccagaagaagatgccaaacgcattatcaaggttgtcgtagatggcgactacgaagcaactaaggcaactgtaacaggggtcttaagaccagattactaataaagacaataaaatccggctctttgtcaactgtagtgggttgaagtcagctaagctcgagaaaggacaaattttgtcctttcttttttgatattcagagcgataaaaatccgttttttgaagttttcaaagttccgaaaaccaaaggcattgcgcttgataagtttgatgagattattggtcgcttccaatttggcgtttgaatagggtagttgaagggtgttgacgattttctttttgtcctttagaaaggttttaaagacagtctgaaaaataggatgaacctgcttcagattgtcctcaatgagtccgaaaaatttctccggttccttattctgaaagtgaaacagcaagagttgatagagctgatagtgatgtttcaagttttgtgaatagctcaaaagcttgtttaaaatctctttattggttaagtgcatacgaaaagtaggacgataaaatcgcttatcactcagtttacggctatcctgttgaatgagtttccagtagcgcttgatagccttgtattcatgggattttcgatgaaactgattcatgatttggacacgcacacgactcatagcacggctaagatgttgtacaatgtgaaagcgatccaacacgattttagcacacgggaaaagttgtctagctaagtcatagtaaggactaaacatatccatagtaatgattttgacgcgacatcggacggctctatcatatttaagaaagtgatttcggatgacagcttgtgttcttcccttaagaacagtgatgatattgagattgttaaaatcttgcgcaatgaagctcatctttccttttgtaaaagcatactcatcccaagacataatctcaggaagacaagaaaaatcatgtttaaagtgaaagtcattgagcttacgaataacagttgaagttgagatggaaagctgatgggcaatatcagtcatagaaatcttttcaattaacttttgagcaatcttttggttgatgatacgagggatttggtgattcttcttgacgatagaagtttcagcgaccatcatttttgaacagtgatagcacttgaatcgacgctttctaaggagaattctagtgggcataccagtcgtttcaagataaggaattttagaaggttttttgaaagtcatatttcttcaattggtttccgcactcagggcaagatggggcgtcgtagtccagtttggcgatgatttccttgtgtgtatccttattgatgatgtctaaaatctggatattagggtctttaatgtctagtaattttgtgataaaatgtaattgttccatatgattctttctaatgagttgttttgtcgcttttcattataggtcatatgggactttttttctacaataaaataggctccataatatctatagtggatttacccactacaaatattatagaacctaaaatccatgaccgaatgaaggatcatggatttttcttattttcctaaacagaattggctaaagagttgggtgatgagttcatctggagcagcatctccagtgatttctcctagaatttcccaagtacgggtcaagtcaacttgaagcaagtcaactggcatccctagttcaagaccttggttaacagcttgtaggctttcaacggccttctcaatcaaggaaatgtgacgggcgtttgacaagtaggtagcatcttgctcaaccaaaccagcattttcaaagaagaggttgttgattctctcttcgattttatcgatgttttgatttttaagaactgaaatgcggatgacatcttcaggtagttccgaagtttcaatcgtttcaggcaggtcagttttgttaagaagaataatgcgattagtctcctgactgatttctaggagttggcgatcttgggcggttagtggttcactagcgtttagtactagcagaactaggtcagcttccttaagagcttttttcgaacgctcaactccaatttgttcaacgatatcatccgtttcacgaataccggctgtatcaatcaatttgagaggtacaccattgatgttgacgtactcttcgatgacatctcgtgttgtcccagcgatatctgttacgatagccttgtcctcacgcaagaggttgttgagaaggcttgatttcccaacgttgggacgtccaatgatagccgttgaaattccttcacgaaggattttaccacgacgtgctgtcctaaggagtttggttagtaattgctcaaactccattgtcttctctcggacaacagcagtagtggcttcctcaacatcgtcatactcaggatagtcgatattgacctcaacttgggcaagtgtattgaggatttcttgacgggtattgttaatgaggtcagaaagggagccgtctaattgtttgaccgcaatgttcatggccttgtcagtcttggcacggatgatatccatcacagcctctgcctgtgtcaagtctacgcgaccgtttaaaaaagcacgtttggtaaattcaccaggttctgccaaccgagccccttcacgaatagctagctggagaatttcattggtcaccgcaatcccaccgtgggtgttaatctcgataatatcctcacgagtgaaggtctttggagacttcatagccccaaccataacctcgtccatgactttaccagtcagaggatcaataatgtgaccgtagttgagagtgtggctggcaaccttgttcaagtcttttcctttaaaaatcttttgcgcaatagcaaaactgtctgttccgctcaggcggacaataccaatagccccttcacctagtggagtagagatagcagcgatggtatcaaattcacgtgtaatcataatgtttcctttaattaatagctcttttcttggaaattctccaagtttcttttcaaattgtaacaaatttaggatatttcttcaatgaatgctacttggagattgaaaaagcctaagcaattctgcttaagctagcttatttagtacgcatttccccttgtgggaagtaagttccttctggcatgtcgttgatgatgacatggacagcagattgaggggctccagtgttgcggacaactgcttccgttacttccttagcaagagctttcttttgctcgagcgtgcgtccttcaaataaatcgatgcgtacaaatggcataatagcttcctccactagtttttgatttcttctattttaccacattttgccgtttaaagcttaagaaaattatgatatactagaatgtagcaaaaatttagaaatggacgtgaagcaagaaacatggcacagttgtactatcgttatgggaccatgaactctggtaaaacgattgagattctcaaagtggcctataactacgaggagcaaggaaaaggtgttgtgattatgacctcggctctggatacgcgtgacggcgttggctatgtgtcgagtcgaattggcatgaaacgccctgcccttgcgattgaggaaacaacggatatctttggctatatccgagacctaccagaaaaaccttactgtgttttggtcgatgaagcccagtttctcaaacgccaccatgtttacgacctagctcgtgttgtggacgagttagacatacccgtcatggcttttggcttgaaaaatgactttcgcaatgaattgttcgaaggttccaaatatctcttgcttttagcagacaagattgacgaaatcaagaccatctgtcagtattgcaagaaaaaggcgaccatggtgttgcgaacacaggatggactgcccgtttacgatggagaacagatccagattggtggtaacgaaacctatatctcagtttgccgtaaacattattttgcgccaatgataacctctaacaaggagcaaaactatgacaattgaactaagagatgttacaatggaaaattattttgatgttttaaatttggatgtcaaggaatatcaaaaacaattcattgcaaccaacgcaattagtttagctgaagcatacgtctacactaaaaatggagattttgtagctccattggcagtttatgataatgatgcaattataggttttgtgatgatagcttatgataaaaagatcggaattagtagtggaaattatttactatttcgttttatgattgataagaattttcaaaatcaaggatattttaaaccaattatggataaagtactagactatgttcgaacagcgccagcaggtttaagcaataaactttggttgtcttatgaaccagaaaatgaacaggcaagattttgttacctcagttatggatttaaagaaactggggaaatatccgagaatgaagtagtagcaatctatgatttaacaattgagaaataaggagaaaaaatgaacatctatgatcaactacaagttgtagaagaccgttatgaagaattaggagaattgctgagtgaccctgatgtcgtttcagacaccaagcgttttatggagctttcaaaagaagaagcttccaatcgtgacaccgtaatagcctaccgtgagtataaacaagtccttcaaaatatcgtcgatgccgaagagatgattaaggaatcaggcggagatgcggacttggaagaattggccaagcaagaactcaaagatgccaaggctgaaaaagaagaatatgaagaaaaactgaaaattttgctccttccaaaggatccaaacgatgacaagaatatcatccttgaaatccgtggagcagctggtggagacgaagcggcacttttcgctggagatttgctaactatgtaccaaaagtatgcggaagcccaaggttggcgctttgaagtcatggaagcctctatgaatggtgtcggtggttttaaagaagtggttgctatggtttcaggtcagtctgtatactctaagcttaagtatgaatcaggtgcccaccgtgtgcaacgtgttcctgtgacagaaagccaaggccgtgttcatacttcgacagcgacagttcttgttatgccagaagttgaagaggttgaatacgacattgatccaaaagaccttcgtgtcgacatctatcacgcctctggtgctggtggacagaacgtcaataaggttgcgactgccgttcgtatcgttcacttgccaaccaatatcaaggttgagatgcaggaagaacgtacccagcagaagaaccgtgagaaggccatgaaaatcatccgtgcccgtgttgctgaccactttgctcagattgctcaagatgagcaggacgctgagcgtaagtcgacaatcggtactggtgaccgttcagaacggatccgaacttataacttcccacaaaaccgtgtcacagaccaccgtatcggcttgaccctccaaaaactagatacgattttgtctggtaaattggacgaagttgtggatgccttggtgctttatgaccaaacacaaaaactagaagaattaaacaaataatgaaattagctcaattattttcaaattttgaagaagagttgataagacaaggagaggaagcggaaagcctctcttttgtctatcgtagtctgaaaaatctatcttttacagactttatttttgccctccagcaggaggtgacaacagaggaagaaaaacaatttgtagaagatatttaccagcaactagcagctcacaagccagctcagtacatcattggacaggcagatttttatggaatgcatttaaaggtggatgaacgggttttgattcctcgtccagaaacagaggagttggtggagcttatcctggctgaaaatcctgtgaaaaatcttatggtcctagatatcggaacaggtagtggagctattgctctcgctctagcaaaaaacagaccagattggtcagtgacggcagcagatatttcccaagatgctttagatgtagctagcgaaaatgctaaaaatcaaaatcttcaaatatttttaaaaaaatctgactgttttacagaaatttctgaaaaatatgatataattgtttccaatccaccctatatctctcgtgaagatgagtcagaggtaggcttgaatgtcttgtattcggagcctcatctagctctctttgcagatgaggatggcctagctatttaccgtagaattgcggaagatgcaaaagactatctcaaagatggtggtaagatttaccttgaaattggatacaagcaaggtcaaagtgttcctgaactttttaggaaacatcttcctgaaaagcgagtacgaacactcaaggaccaatttggtcaagataggatggttgtcgttgatgatggacaggattagacaagagttggaaaatggtggagctgtcgttttgcctacagagacagtttacggtctctttgctaaggcgctagacgaaaaagcagttgaccatgtttaccagcttaaacgtcgacgtagagacaaggcgctcaatctcaatgttgcctctttagaggacatcttgtacttttcaaagaatcagccaacttatcttcaaaaacttgtagagatctttttaccaggtcccttgaccattattctcgaagctaatgaccgagttccctattgggtcaattctggccttgcaactgttggatttcggatgcctagtcatcccattacccttgatttgattcgagagacaggtcccttgattgggccgtctgccaatatctcaggtcaggcgagtggagtgacctttaatcaaattctagaggattttgaccaagaggttctgggtctggaagacgatgcttttctaactggacaggattcaactattttgaatttgtcgggagacaaggtgaaaatcttacgtcaaggggccattaagcgagaagatattcttgctcggttgccaaagatttcttttgaggaggaatgagatgctaagagatttaagagaaactgatgtgaaagctatatgtgacatcaaccaagaggctttgggttatacttttagtccagaggaaacggctagccaactagctagactgtctcaggattcccatcatttcctacttggctatgaggatgcagctaatcatgtcttacttggatatgtccacgctgaagtttacgaatcactctattccaaagcaggatttaatatcttagctttagcagtttcacctcaagcgcaaggtcaaggtattggtaaaagtttactacaagggttggaagaagaagcaaaaagatgtggttatgggtttatccgcttaaattctgccaatcatcgtctgggtgctcatgcattttatgaaaaagttggctatacttgtgataaaatgcagaaacggtttattcgcatctgttagtttgattttcttattgtaaaatcaaactaatggactagtcacacaataaaggagaagacctatgatttttgacaaagatgattttaaagcatatgatgctgatctctggaatgctattgccaaagaagaagaacgccaacaaaataatatcgagttaattgcttcggaaaacgtagtttccaaggctgttatggcagctcaagggtctatcttgacaaataaatatgccgagggttacccaggacgccgttattatggtggaactgatgtagtagacgttgtagagactcttgctattgaacgcgcaaaagaaattttcggtgctaaatttgccaatgttcaaccacattcaggaagccaagctaactgtgcggcttacatgtccttgattgagccaggtgatacggttatgggaatggatttggcatcaggtggtcatttgactcatggggctcctgttagcttctctggtcaaacctacaactttgtttcttatagtgttgatcctaaaacggaactcttagactttgatgctatcttgaaacaagcccaagaagtaaaaccaaaactgattgtagctggtgcttcagcctattctcaaattatcgatttttcaaaattccgtgaaatcgcagatgctgtcggtgcgaagctcatggtggacatggcccatatcgctggcttggttgcggctggccttcatccaagcccagttccatacgctcatatcacaacaacaacgacccacaaaacccttcgtggacctcgtggtggtttgattttgaccaatgacgaagaacttgctaaaaaaatcaattcagctattttcccaggtattcagggcggtcctttagagcatgttgtggcggctaaggcagtttccttcaaagaagttttggatccagccttcaaggaatatgctgccaatgtaattaagaacagcaaggctatggcagatgtcttcttgcaagaccctgatttccgtattatttcaggtggaactgaaaaccatctcttccttgttgatgtgactaaagttgtagaaaacggcaaagttgctcaaaacttgttggatgaagtcaatattaccttaaataaaaactcaatcccttacgaaagcttgtcaccattcaagacaagtgggattcgtatcggagcagcagccattactgcacgtggatttggtgaagaagaaagtcgcaaagtggctgaactcatcattaaaacccttaagaattcagaaaatgaggctgtattagaagaagtgagaagtgcagtcaaagaattgacagatgccttcccattatacgaggactaaaacttttatggacatttatattaagaaagccattattcaccagttcagtccggatgataccgaactgttcttagcagataagtttctcaatattactccaaaaatcgaagaatacctgcgtaaaaaaattgaacatgtgtattcagatgaagccaagactgggattttcgaagaagaaaatcccttcttcaatcatattacagacgatttgttggagacatcagtaacgctggctaatctctggaaagaggagtttagcatttctgaaaatctcaagaccaatgacttgatttttgtgcaattttctaaagaaggtgtagaacatttcgctttcttgcgaattgccctgcgggagaccttgacccacctcggaggagaagttgataatccaatcaagctaactcagaataacctgcctggatttggaacaggagctgatgaggccttggtggtcaatcttcagagtagcaagtatcacctgattgaaaaacgaatcaagtacaacgggacttttttgaactatttttcagataatcttcttgctgtcgctcctaagatttctcctaaaaaatctatcaaggaactggaaaaaacagcccagagaattgctaaatcttttaacacagatgattttcaatttcaatccaaggtcaaatcagctattttcaacaacctagaagaaagcaatgaattgtcacctgagaaattggctaatgacctttttgacaacaatctgacggctcgtttgagctttattgaccaagtcaaagaagccgtaccagaacctgttcaatttgatgaaattgatgccagtcgccaattaaagaaatttgaaaaccaaaaactctccttatcaaatggaattgagctcatcgttcccaataacgtctatcaagacgccgagtctgttgagtttatccaaaacgaaaatggaacctactctatcttaatcaaaaatatcgaggatatccaaagtaaataatgtttaaacgaattcgaagagtgcttgtactagcagtcttcctttttgctggctataaagcttaccgcgttcatcaagatgtcaaacaagtcatgacctatcaacccatggtgcgagaaatattgagtgaacaagacaccccagcaaacgaagagcttgtgcttgctatgatttatactgaaacaaaaggaaaagaaggcgatgttatgcagtctagtgagtctgcaagtggttccaccaacaccatcaatgataatgcctctagcattcggcaaggcattcaaactctgacaggcaatctctatctggcgcagaagaagggggtagatatctggacagctgttcaagcctataattttggacctgcctatatcgattttatcgcccaaaatggcaaggaaaataccctggctctagccaaacagtactctcgtgagactgttgcccccttgcttggtaataggactggaaagacttatagttatattcaccccatttccatttttcacggtgctgaactctatgtaaatggaggaaactattattattctagacaggtacgacttaacctttacatcatcaaatgtttcactctcttttcaacatctggctagaccaggtgtttttgttataagttttctttaagatagatatattactctaaagaagtaaaggaggaaattccctatgagaaagaaactctttctgactagcgctgcgatcttgtgggcagtaacagctatgaatagcgtccatgcagcaacagatgttcaaaaagttatcgatgaaacctatgtccaacctgaatatgtcctaggttcctccctatctgaagaccaaaaaaatcaaactcttaaaaaactgggctacaatgcctcaacagataccaaagaactcaagaccatgacacctgatgtttattctaaaatcatgaatgtggccaatgactctagcttacagttgtattcatcagccaagattcaaaagctaggtgacaaatcgccacttgaggtcaagattgaaacaccagaaaatatcactaaggtgactcaggatatgtaccgaaacgcagcagtaacgctgggtatggaacatgccaaaatcactgtagcagcccctattccagttacaggagaaagtgctttagcagggatttactattcgctagaggctaatggagccaaggtgccacaagctaataaagatttggctcaagaagagctaaaagctttgtcagatatcaatgctgaaaacaaggacaaatcaggctatgatgctaataaattaaacgttgccctagctgatatcaagtcaggactcgccaaagctaaagaaagtaagggaaatctgacagaagaagatatccgcaagattgttgaagataccttaaaaaattacaaacttgatcaggtcataacaggaaaccagatcaatatcatcatcaattttgccttgaatctctcaaagagtgatatcctcagcaatgcagatttcactaaaaccctaaatgaccttaaacaaagcatcgtatcacaagctggcgacagttttaaaaatatcaaccttaactttgatgcggataaggcgctagaggacggtggtaacttcttaagctccctctggcaagcccttgtcaacttcttcaagagttttggttcttaagaaatttcatggtataatggatggtaaccgtaacgttgccgtcttttttgtcggccaatagaaagagaaaagaatgttaaagaaaaatgatattgtagaagttgaaattgttgatttgacccatgaaggggcaggagttgccaaggtagatggtttggtcttttttgtagagaatgctttaccgagtgaaaaaattctcatgcgtgtcctcaaggtcaataaaaagattggctttggaaaagttgaaaaataccttgtccagtcaccacaccgtaatcaagatctagatttggcttacctgcgttcaggaatcgcggatttaggacacctttcttatccagaacagctcaagtttaaaaccaagcaagtcaaggacagtctctacaagattgctggaattgcagatgtagaagttgctgaaacgcttggtatggaacatccagtcaagtatcgcaataaggcgcaggtgcccgttcgtcgagtgaatggtgtcttggaaacaggatttttccgtaagaattcgcataacctcatgccccttgaagatttctttatccaggatcctgtcattgaccaagtcgtagtagctcttcgagacctgctccgtcgttttgatttaaaaccttatgacgaaaaggaacagtctggattgattcggaatcttgtggtgcgtcgtggtcactattcaggacaaatcatggtcgttttggtgacaactcgtccaaaagtttttcgtgttgaccaattgattgaacaagttatcaagcagttcccagagattgtgtctgtcatgcaaaatatcaacgaccagaataccaatgcgatttttggtaaggagtggcgcactctttatggtcaagactatattacggaccagatgttgggaaatgacttccaaatcgctggcccagccttttaccaagtcaatactgaaatggcggagaaactctatcaaacagccattgactttgcagagttaaaaaaagatgatgtgattattgatgcctattctggtattggaaccattggtttatcagtcgccaagcatgtcaaagaagtctacggtgttgaactgattccagaagcagtagagaatagccagaagaatgcttctttgaacaagattactaatgcccactatgtctgtgacacggctgaaaatgccatgaagaaatggctcaaggaaggtattcaaccaaccgttatcttggttgatcctccacgcaagggcttgacagaaagctttatcaaagcaagcgcccaaacaggagccgatcgcatcgcctatatctcctgcaatgtcgcaaccatggcgcgtgatattaaactataccaagagttgggatatgaattgaagaaagtccagccggtggatctatttcctcaaacgcatcacgtcgagacggtagcacttttgtccaaactcgatgtcgataagcacataagtgttgaaattgagctggatgagatggatttgacaagtgcggagagcaaagcaacatatgctcaaatcaaagaatatgtttggaataaatttgaattaaaagtttcgacattatatattgcacagataaaaaagaaatgtggaatagaattacgagaacattacaacaagtctaaaaaggataaacaaattattccacagtgtacacctgaaaaagaagaagccatcatggatgctttgagacacttcaaaatgatttaatagaaaagaatgacagtatatgactttctgcatttattacattcctacttggtataggaacagctattattcctttcttgcaaggtatcaattagaaaataggctcaatataaagattgataggatcatttttatatttaaaggagcgttgaaatgattgataaaggcaacaaaaaattttaggataaatttgctaagttgtatgcctcttttatgaaaaaagataaagaggtttatgataaagtttgtgaatatcttagtcctcatttgaataaagatatggaggtgcttgaacttgcttgttggtttcgtgtcataacagttatagaggcaaatagttatgtaaatataaggagttcaagacttctaccaaagtttaaaactcaaaaaataaatagttggtgtgctgcttacaatatccattttaataatggatattgtaagcagcacacctaatgaatttaaagattctttaaagagtcttattttgtgatgaaaatttaatatgtaaatctcagacgatagaaattaaaaactctatcgtcttttttatactcaaaattaggaggtaaaaatggtaaggataagaggtcccacttaaaacaatttatggcaaaataaggacggaataacacaacaaattctctaaaacaaatcactaaatcaatgtaagattgaatgaaatcaatatttatgctataattaaataaatttaatgaagaaaaaaagagggatattatggcacttaactataaaccattatggatacagttagcaaaaaaaggactaaagaaaacagatgtaatagctatggcaggacttacaacaaatgttatggcacaaatgggaaaggataaaccaattacatttaagaatttagaaagaatatgtaaggctttatcttgcactcctaatgatattattagttttgaagataattttagtgacgaggaatagaaaatgactttaaggacagaagatcaagttagggattatgcaagagaagtataggctttaatgaagttgaagaaaacatcaatcaaggtactggtcaaataactacttttaatcaattaggcttcaagggatattcaaataagccagatggttggtatttacctaaaaatatgaatgatgtagcaataatccttgaaacaaaatcagaagaaagagatattagcaaacaaatttttattgatgagttaatgaaaaatatagacataatttaactaaaaataaaaactagatccttttttgaaaaaattatattattaaatttgtaactgtatctattgacaatgataattattatcgatacaatagacttgaaatatgtttaaggagtttttatgaaaaacaaattttttctaatagctattttagctatgtgtatagtttttagcgcttgttcttctaattctgttaaaaatgaagaaaatacttctaaagagcatgcgcctgataaaatagttttagatcatgctttcggtcaaactatattagataaaaaacctgaaagagttgcaactattgcttggggaaatcatgatgtagcattagctttaggaatagttcctgttggattttcaaaagcaaattacggtgtaagtgctgataaaggagttttaccatggacagaagaaaaaatcaaagaactaaatggtaaagctaacctatttgacgatttggatggacttaactttgaagcaatatcaaattctaaaccagatgttatcttagcaggttattctggtataactaaagaagattatgacactctatcaaaaattgctcctgtagcagcatacaaatctaaaccttggcaaactttatggagagatatgattaaaattgattcaaaagccttaggtatggaaaaagaaggtgatgagttaatcaaaaatactgaagctcgtatatccaaagaattagaaaaacatccagaaatcaaaggaaaaatcaaaggaaaaaaagtattatttactatgattaatgctgcagatacatcaaaattctggatttatactagcaaagatccaagagcaaattatttaacagatttaggtctagttttccctgaatcattaaaagaatttgagagtgaagatagttttgcaaaggaaatttctgcagaagaagcaaataagataaatgatgctgatgtaatcataacttatggtgatgataaaactcttgaagctttacaaaaagatcctcttttaggtaaaataaatgcaattaaaaatggtgccgttgctgtaattccagataatacaccgttagcagcctcatgcactccaacaccactttcaataaactatactattgaagaatacctaaatcttttaggaaatgcatgcaaaaatgcgaaataaaaaacaaataaacctaggcataatttttataatctgcctaggtcttcttattacaatatttttgtcattaaagcttggaacaaaagaaattaatatcagagattttttagcagcttttggaatgggtaatacaaatgatgattttattaaatcaattatatataaaagaatacctagaactatttttgcaattttagcaggttctagtcttgccataagcggtgtattgatgcaatcagttactagaaacccaatagctgatccaggtatactcggtataaacacaggagcaagtcttagtgtagtaattggtctttcttttttaggaatttcatcaagcataagccatataagttttgcaatcattggtggcttagtaagtgcaatttttgtatacgcgattgctgtaagcggaaaagcaggccttacccctataaaacttgccttatcaggaacttgtgttagtatggctttaagcagttttgtaagttttttaattttaccgaataataacgtcttagacaaatttagattttggcaaataggtagccttggagcagctacattatcttctatatctacactactaccttttataattttaggtcacttgatagctatatttatttcatcagatttaaacgctttagctatgggtgatgaaatggctgttggtcttggagttaatgttaataggataagatcacttgcaataattgcaagtgtgcttttatgttcaagtattactgcaattggtggacctattggcttcgtaggtcttatagttcctcacttttgtggcttatttataagcaaagatatacgcacaatgaccatttcttcatcttttataggtgcagagctcttgcttatatgtgatataatcggccgtatgttaggtaaaccaggtgaaattgaagtagggataattactgcaataatcgggggtccagtacttatttatgtaactatgaaaaatagaggggttaataactaatgcaaaatttaattataggtattcaaaaaagaaaaaatagaataacactattttcctcactatttttattaataataatcagtctatcatttttcattttacttatcggagatgaaagttattctttttcaactttgattaaagtcttaaatagtgaaactgttcctggagctagtttttcgattatggaaattagattaccaaaattattagcaggaattatagctggctggtcttttggattggcaggatttatctttcaaactatgttaagaaatcctcttgcaagtcctgatataatcggtgtcacaagttcttcatctattgcagcggtcttttgcatattggtattaaaaacaaatagtttaactactggaattatttcaataacttgtggactaacatcatctttaatattatttttactagctaaaaaagatggtttttcagcagcaagactgataatattaggtattggttttcaagctgtcacaagagcaggcacctcatttttattgttgaaagtagcaagatatgaattacaagaagttatgagatggctcagtggctctttatcttttacaaagttagatgacatacctcttgttctaatagtaagtattattgctactatattagttttattttttaataaaagactagaaattattgaacttggtgaagaaatagcaatcggacttggagcaaatcccgagctttcaaggcttgttttaattttttgcgctgtatctttaactgctttttctacttcaattacaggaccaatagcttgtatatcttttttagctggtcccatagccttaaatattggcaagaaaagaagcccaatattagctggattggttggaattttactagttttgttatcagacatattctctcaaaatattttaccagctagatatccagtaggtgttgtaactggcttgttaggttcaccatacttaatatacttactaataaaaatgaacaggaggaatatataatgaaaggtctgtggtcaaataatcttacctgcggttatgatgaaaaaataatcttggaaaatataaatataaaaatacctgaagaaaaaatatcagttattattgggtcaaatggttgtgggaaatcaacactcattaaaaccttgtctcgacttataaagccattagagggagaagtattgcttgataataaatcaattaattcttataaagaaaaagatttagcaaaacacatagctatattacctcaatctccaataatccctgaatcaataacagtagctgatcttgtaagccgtggtcgtttcccctacagaaagccttttaagagtcttggaaaagatgaccttgaaataataaacagatcaatggttaaggccaatgttgaagatctagcaaataacctagttgaagaactttctgggggtcaaaggcaaagagtatggatagctctagccctagcccaagatacaagtatcctacttttagatgagccaactacttacttggatatctcatatcaaatagaactattagacctcttgactgatctaaaccaaaaatataagacaaccatttgcatgattttgcacgatataaatctaacagcaagatacgctgattacctatttgcaattaaagaaggtaaacttgttgcagagggaaagcctgaagatatactaaatgataaactagttaaagatatctttaatcttgaagcaaaaattatacgtgaccctatttccaattcgcctctaatgattcctattggcaagcaccatgttaactcttaataattgaatattggaattcatttaaaagtcgcaaattttgaactgaccctcaaaagttaggccaaaaaactaactaaaggaggtcagttttttaatggcaaatacagcacagaatttaagataaaattagtaaaagaatatcatgaatgaaaaataggatatagagaataacagcaatattaaaaagatcaggactgataataaacaaaaagaaagtacaacgactagttcaaaagctaaaacttcaagtaaaaagttattcaagaaaatctagaaaatactcatcctacaaaggacaggtaggaaaaatatcagacaacaaaataaaaagaaatatttattaccgaaaaaaaggggaaatcgagttaagtaccaacaggctcatctattccaaaaagatatttactcgatggaaaaactcctagaattagtgctacaaatattgacaatggtatcttaggttactacgaagatatagatgataaaaattatagagtttttgaaaattttatatctgtttcatttttaggagcagtcttttatcataaatataaagcaagcctagatatgaaaattcattgtttaaaattaaaaaataaagaattgaataaagaagtagcattctatttaacttcaattattaggcaagctttaaaaaatactgaatataaagatcaaatatctagcacagtattgccagatatcaaaattaaattaccgatagacagtagaggtactccagattggaattacatggaaagatatagagatagataaagagagagagggagagatagataaaaagtccacccccattttttatggagaattcaaaaatgtaaggttaagcaaagaagaatataaaaatctaaaagaaaaattaaactcacacacagatataatgataaataaactatccagatacatggaaagcagtggtaagacctatcaaaaccactatgtgacaatcttaaaatggtatgaagaagataaagacaaactaagacagaaaggtttaaataaaaaaatgaattatgatgtaggagaatctttatagataaaaagaggtggaaaggcactattaaagactttaagtctaaaaaggtatcaaagtatgccagagataaaaaaatataaatatgacactttaaaggcgattagaaaattaaagaaatgctagaagacttttagatgacagttaccaagagggtctaattttcactgctatttatgcagtgggaattggacctttttatataagcaaattctatttcaaaattggttaccaagaaagacttcttttcactgttaagtataagagggtaatttatagaattttgttacatcaagataaatattttctgatggtcaaattttaaaaagattaataactctcgataaattttgaaccttaacaattgaatagaccaagacaagacgttaattatttttggagcgtaataacctatccgtcaagatctttcggctgaataattcggcaaaaaaagttctgctaagcaaaaagaaagtgagcgataagtaagagtttgaatatagggagggataccctatccgctatgaagaaaatgagggtaatgatacttctaaggttgaagccggctcatccggaatagaggcggaagtgagattcctatgttgctaatccaaagcacttgtcaatgtcaaaaaacttaattaaacaaataattattagatataaaactttagaggaggtatatattggacaatgactggaatggattggctgatttaatagcaaatctgattgcaaaatatgctggtgctttagatttagataatctacccgatccaacgccagcaaaaaatcaagagatgaaaaatagttttgacatggcaaaaacacaaattgagacggactaataaaagtgttataatatacttgaaatgatagtccaaacttaaattaaaaaaattatatatgatatagaaaaattatattgaggttaatactatgtcaaaagaaaaaataaaagtatacctctatacacgagtatctacgtcaatacagatagaggggtattcgttagaggcacaaaaatcacgaatgaaagcttttgctatttacaacgattatgaaattgttggagagtatgaagatgccgggaagtctgacaagtctattgaaggtagaatacagttcaatcgaatgatggaagatataaaatctggaaaagatggagtatcttttgttcttgtgtttaagttatcaagatttgcaagaaatgccgctgatgttctttctacacttcatataatgcaggattatggagttaatcttatctgcgttgaagatggcattgattcatctaaagatgctgggaaactaatgatttctgttttatcagctgtggctgaaatagaaagagaaaacatcagtattcaaacaatggaaggtcgcattcaaaaagcaggggaaggaaaatggaatggtggctttgctccgtatggatataaacttgaagacggcaagctgtttataaatgaggaagaggcagttgcaataagaacgattttcgaccagtatgtaaatactacgataggagccaatgggatatctaaatacttagagaatcatggaattagaaaaatcccaagacagaatggtaagaatcctttgtttgatgcaggtcttataagaaagatattaaagaatcctgtatataatgggaaaatagcatttggaagaagaactttagaaaaagttcatggtacaagaaatgaatataagcaggttgaacaagatgaatatctaatatctgaagggatacatgaagctatagtttccgatgaagtttggcaagctgctcaggttaagctaaaatctcaagcaaagaaatatgagcatgtgaataaaggaaaagatacacgcacacacttgctttctggaattgtaaaatgcccgatatgtggagtgggaatgtttgggaacaagtgtatcaagaaaaagaaagatggcacaaagtataaagatttttattactatggttgtaaccataggcagatgataagaggtaataagtgtacattcagtaagcaaattagagaagaattgttagatgatgctgttgcagaggtgattgtcaagatagtaagtaatccgaaatttgcttctatgatgcaagaaaaaatcaacatgaaggtggatacctctgaaatagaaaaagaaatagataattaccaaaaggaattgagaaagagtcattctacaaagtttaagctaattgaggaaatagataatttagatgttgaagataagcattataagagaaggaaacaggatttagatgatagactatatcgtatgtatgacaaactagatgaattagaatcatcactaattgatgcgaaagcaaagaaacagactattgaagctgaaaagcttacaggagataacatatataaggttctgatctattttgataagctctataaagtcatgaatgatgtagagcgtaggcagttaatttcagctttgatttctgaaattcaagtttatgaagaaaaacaatctaacggacaatggctaaaatccattacttttaagctaccaattatagaagaaaatctcaacataggtttggacaatgatgaacaagttgaatgtgtaagtttattagagaaacgtagttaatcctcaaaaggttccccgaaccttttgagtcccactgacgcatcacgctgaggcggtatcactgcttgtacgagttgaagcatcagcaaagtaaaagtagatgttcagccaatgcgacgaggtgagaccgaaggtcgataaggtgtgttctgggtataagactcgtaaagtaagtaggaaatatgatgagatgatacagagagcctgaattggtcaggtgacgtgcttatttacattagcctgataatgaaaatggagagattatcgatggttatattggaattgtaccaaaatgattattctaaagatttagtagcatttgattccatagaagatgggaaagcctttgtagctcaaatcccgggatacactctggaaacagaagatggttttgaagtggagtattttaatcctaaaaacataccggattatatggaaattatttttaacggaaatattgttcctttatctaaatttatgttcgatcctgaggaaaatgtaaacattatttggaaagagatttcaaatttatccctcaaaaatgatagagtgatcgaaggatattcaaaaattgatgcatatgtcgttaacaaccatgaagttaaagcctatgtcgaaacaagagaaacgaactatcgtaaagcaaaagacttcttagaaagccgcggatatgaaatcgacagaagctttttcggaagtgaagacggtgaagcgattctttacagaaaaaaagggatcgaagtttggcatttcttgtgtcacttagacccaatgtttgtagagattgaagatgtagaaggatatgttaaagaagaagttggagagattcaatagtcaaccaaagttccttgtgagtatatacctttgctagtaaaagagtcaaaacgttataacgaagggggggaagaaaacccttgagtgtaagtctttttcttgtttagagggaaagtattagagtagccgctcataatttatactagatttgataactgatttgagacagattttatttctataaatattgtgaaaattttttaataccaaagatttaaagttactgtgttaaaaatcctctccacttttaaactaatgtattataaaagccagttgacactagtgttacacctgtgatagaattaacttgaggtgatgaaaatggcaaccgataaaaatagaataatgattagcttggatgataaaaatctagagaaacttgaaaatttagtagaagatgctagagatagaaggggaatgcgactaacaaagtcccaggttattgaattactcctaaataccgttgattatttcgatgatattatgggggctatttactcaaaaaaataagagcaaaattgctattattttttacaaattggtgtaacactagtgatataggagtgatgaaatggttgtttatattagacaaagtaaattaccaagtgaggtttcaattaataaatacaatgctcaagtaggtgcctacttacaaggagaagaagttattttatatcaatctttttctgaaataaaagagttaacaagtgaagatatagttgtagattatataatggagactagagcattactaaaaatgatgggcttaaacgttccggttcatgactatcctattgagcttaaagagttttatggtcgaaagatttatgctggtattttaggagagattgtgaatatacctgataattggggaaaatttattaagcctaaagctggttcaaaagtctttactggaagagttgttaatggaacccatgatttaataggtattggtctacctttcgactatcctatatggattagtgaggttgtagaattcatagctgaatggcgttgttttgtgttagatggtcgcgtattagatgttcgaccctatacaggtgattatcatgcacaatttgatgcaagtgtaattgatgaagcgatatcatgttggaaagatgcgccaatagcttatggactagatatcggtgttactcgcgatggcagaacacttgttgttgaagtaaatgatggttatgcattgggaaattatggcctatctcctttaaaatcaatcaattttcatagagctaggtggaaagaaatggtaaaaccctattttgaaaaaaatgaaatttttaaaatccaacaggatgttattttctaaaataaatatggtagataaccaatataaaaagcatcaaaatgaacaaggaggaatctgatgcttggagcaattattggagatattgtcggttctgtttacgaatggaacaatatcaaaacaaaggactttcctttatttcggaaggactgcttttttacagatgacacggttatgacctgtgctgttgcagaagcaattatgaatggtggacaaaaagatgacttcattgacgcgatgaagaaatatggcagaatgtatccgaatgctgattacggtgctcggtttaatgcatggctaaacagcgataaccgtgagccttataatagctttgggaatggatcagctatgcgtatttctccatgtgcttggatcatggactgtggtttttatgcgaaaactggtatatggccatcatctagaggacttacgagtctttctgcagaggtaactcataatcatccagaaggtgtcaaaggcgctatggctacagctgatgctatctttctatgtcgtttttactttggtggttattgtagagagtacgagcaatcaattaacgacaatcctacagagtgtaaaagacgaattaaggattatatagaaaaagaatacgattacaatctatctcaaactttagatgaaatccgtcctaactatcgttttaacgaaacatgtcaggaaactgtccctcaagccattatcgcctttcttgaaagtagagacttcgaagatgcgataagaaatgccatctcacttggtggcgacagtgatactctcgcagcaatcacttgtagcatagcagaggcagcttacggtattcctgattggatcaaggataaggcctattcttacttggatgaacccttaaaggatgtagttaggcgatgggaaaatagaataaaagcgtattaatctccagtacgtcagatttctcttttctgtattttcattgtataataggattacatttacttgcatacgacgaaatgtaaacatttctgtttaaaattaaggataaaatcaatgaaaaaagcaatggtaattatcaaccctacttctggtggcgagaaggctttggattacaaagaaaagctggagaataaagcaaaagaatactttgaatatgttgaaaccaaaattaccgaaaaagcgctggatgcaacacattttgctgaagaagcttctcgtgagcagtatgatgcagtggttgtgtttggtggagatggaactgtcaatgaagtcatttcaggtattgatgagagagactacattcctaagttagggattatcccaggcggtacgggtaacctcattacaaaacttttggaaatcaatcaagacatcgatggcgcaattgacgaactggattttgatttaaccaataagattgatatcggtaaagcaaatgacaactattttggttatatctttagtatcggttctctgcctgaggcgattcacaatgttgaaatagaggacaaaacaaaattcggtattttaacctatgctgtaaataccatgaagtctgtcatgacagatcaggtctttaacattaaggttgagacagaaaatggaaattatgttggtgaagctagccatgttttggtccttttgacaaattacttcgctgataagaaaatctttgaagaaaacaaggacggctatgccaacattttgattctgaaagatgcctctatattctccaaattatccgtcattcctgatttattaaaaggggatgttgtcgcaaatgataatatcgagtatatcaaagcgcgtaatattaaaatctcttcagatagtgaattggagtcagatgttgacggagataaatcagataacctacctgtagaaatcaaagtcctagctcagcgagtagaagtattttcaaaaccgaaagaggattagtatatagagaaagccttttttaaggctttttgtatactttaaaagatagttcctttaacaacggacattccttgcaaatagttttacaaaaatagtatactggattcattgagtttgaaaacgtttgcgtaaaatttgaatgaatactttaggagacaaattgatggaattgagtgctatttaccataggcctgagtcggagtatgactatctttataaggataagaaactccatattcgaattcgaactaagaaaggggacattgaaagcatcaacttgcactatggggacccttttatctttatggaggagttttatcaggatacaaaagaaatggtcaagataacttctggtaccttatttgaccattggcaggttgaagtgtcagttgactttgcacgtatccagtatctctttgagctcagagatacagaaggtcaaaatattttgtatggcgataaagggtgtgtggaaaattctctagaaaatcttcatgcaattgggaatggatttaagttgccttagcttcatgagattgatgcctgcaaggttcctgactgggtttcaaatacggtatggtatcagatatttcctgaaagatttgccaatggcaatgctctattaaacccagaagggactttagactgggattcatctgtcacacctaagagcgatgatttctttggtggtgatttacaggggattattgatcatatgaattacttgcaagacttgggtattactggactatatctttgtcccatctttgaatctacaagcaatcacaagtacaatacgacagattactttgaaattgaccgtcattttggagacaaggagacctttcgggaactggtggatcaagcgcatcatcgtggcatgaaagtcatgctggatgcggtatttaatcatattggttcgcaatctcttcaatggaaaaatgtcgtcaaaaatggtgaacagtctgcttataaggattggttccatattcaacaattcccagtgacaactgaaaagctagttaataagagagacttaccctatcatgtttttggtttcgaggactatatgcctaagctaaatacagccaatccagaggtcaagaattatcttttaaaggttgcgacttattggattgaagagtttaatatcgatgcttggcgtttggatgtggctaatgagattgaccatcagttctggaaggattttcgtaaggcagttttagctaaaaatcctgatctttatatcctaggagaagtctggcatacatctcagccttggctaaatggagatgagttccatgccgtcatgaattatcctttatctgatagtatcaaggactatttcttacgaggaattaagaagacagaccagttcatcgatgaaatcaatggagagtctatgtattacaagcagcagatttcagaggtcatgtttaatctcttggattcacatgatacagagcgaatcctgtggacggccaatgaagatgttcaactggttaaatcagccttagcctttctctttttacaaaaaggaacaccgtgcatttattacggaaccgagctagccttgactggaggaccagatccagattgtcgtcgttgtatgccttgggaacgtgtatcaagtgacaatgatatgctgaactttatgaagaggctgattaaaattcggaaatacgcgtcagtaatcatttcgcatggcaagtatagccttcaagaaatcaactctgatctagtagctctggaatggaaatacgaaggacggatcctcaaagcaatattcaaccaatcaacagaagattatcttttagagaaagaagcagtagcactagcaagcaattgccaagaattggataatcagcttgtcatctctccagatggatttatgattttctaaaaactagttgatgaagattatggtacatttcataccttatatagtataataaggctagttactaaacttgtaaaggagaacttaaatgaattgtagaggacatgaaacaagacaaagaattgttagagattttgaagttcagcctaaagcacatattaagctgttagcaaatcaacaaaaacatagtgatgcaggagcaactattgaagatgaatattatgtatttatcgctgagagtaaaattgatggcaagaaggaagttattcagtgttgcatgggtgcggcaagggattttttagaactaattaatcacaaagggctacctctttttaatccgcttgtaggtgattctcatgtaaataatagacaagaatatgacaatacagggagtggaaatttataacctgaaaagtggaatgaaactgcaaagcagctttataatgctataatgtggttgattattttatggaatgctaagccggatacacctttatttaattttaaagacgaagtaattaagtataaaacatatgagccttttgaaagcagtataaaaagagtaaatactactataaagaatggtagtaaagggaaaactctgactgagatgattaatggctacagagcggataacgatattagagatgaaatttgtaactttaatattctgaaaaataaaattcgtgatatgaaaaaccaacaaggaaatacaatggaatcttacttttagttattgttgaattttgggtattctataaaatatcctaattgagatttaaatagtagactatacaatatagttaaaatatcagtaaaaacaacactttattgaggtattggatacgctttgctaatagcctaataatcacatgtggagtgttgctacaacgaaaaaggtgataatccttgatttcaagctattttataagcattttgtctttgtagataaaggcaattttgacaataaaaatcctaaaaggtgaatcgttatagatgtatttgtagatatcgtttgcgcatcgaaaaaattaatacaagaataaatatttatagctctttaggtgacttttatagaagtaaagtttaggatagaaaaacaagaaataacgcaccatttttggtgcgttatgcttttttatgctataatggatttataaaaataaaggagtttgctatgattggaaagaacataaaatccttgcgtaaaacacatgacttaacacaactcgaatttgcacggattgtaggtatttcacgaaatagtctgagtcgttatgaaaatggaacgagttcagtctctaccgaattaatagacatcatttgtcagaagtttaatgtatcttatgtcgatattgtaggagaagataaaatgctcaatcctgttgaagattatgaattgactttaaaaattgaaattgtgaaagaaagaggtgctaatctattatctcgactctatcgttatcaagatagtcagggaattagcattgatgatgagtctaatccttggattttaatgagtgatgatctatctgatttgattcatacgaatatctatctagtagaaacttttgatgaaatagagagatatagtggctatttggatggaattgaacgtatgttagagatatctgaaaaacggatggtggcctaatggaaatccaagattatactgatagtgaattcaaacatgctttagcaaggaatcttcgttcactgacaagaggaaaaaagtccagtaagcaacctatagcgattttgcttggagggcaaagtggtgccggtaagactacaattcatcgtattaaacagaaagaatttcaaggaaatattgttatcatagatggtgatagttttcgttctcagcatccacactatttagaactgcagcaagaatatggcaaagacagtgtagaatataccaaagattttgcaggaaaaatggtagagtctttagtaacaaaattgagtagtttgagatacaatcttttgatagagggaactttacgaacagttgatgttccaaagaaaacagcacaactcttgaaaaataagggatatgaagtacaattggccttaattgcgacaaagcctgaattgtcgtatctaagtactcttatccgttatgaagaactgtacattatcaatccaaatcaagcacgcgcaactccaaaagaacatcatgatttcattgtaaatcatctagttgataacacacgaaaattggaagaactagctatctttgaaagaattcaaatttaccaacgagatagaagttgtgtatatgattcaaaagaaaatacaacttcagcagcagatgttcttcaagagttactctttggggagtggagtcaggtagagaaggagatgttgcaggtgggggaaaagagacttaatgaattacttgaaaaataaacaattgatatttttaggagaatagaaatgagagggtttaataacaagataaagtctgtttatcaagaactaacaaattccaaagagaaattcggtagctttcacaagactttaattcatttgcatacacctgtttcttatgattacaagctattttctaattggactgcaacgaaatatagaaaaattactgaagatgaactatatgatatattttttgaaaataagaaaataaaagttgataagacaattttttttagtaattttgataaggttgttttttctagttcaaaagaatatattagttttcttatgttagcagaggcaatcataaaaaatggaatagaaatagttgtagtaactgatcataatactaccaaaggtattaaaaagttacaaatggcagtctcaatcataatgaaaaattatccgatttatgatatacatcctcatattttacatggagtagaaattagtgcagcagataaattgcatattgtatgtatatatgattatgaacaagaatcatgggttaatcaatggttaagtgaaaatattataagtgagaaagatggaagttatcaacattcactgactataatgaaggatttcaataatcaaaaaatagttaactatattgctcatttcaatagttatgacattttgaaaaaaggttctcacttatcaggtgcatataaacgaaaaattttttctaaagaaaatacacgattttggagtttaatattaactcgaaagaatcttcgcaacaacttgatattctctataaagaagttggtgtattaagtttgggacaaaaagttgtagccatgcttgattttttattagcatatagtgattattctaaagacttcagaccattgattattgatcagcctgaagacaatctagacaatcgttatatttacaggcatttagttcagcagtttagagatgtgaaagctcaacgtcaaattattttagcaacacataatgctacaattgtaacaaattctatgacagatcaagttgttattatggagtcagatggagttaacggatggattgaatcacagggatatgttagtgaaaaatatataaaaaatcatatcatcaatcaattagagggaggaaaagattccttcaagcataaaatgtctatatatgagacggctttatcagagtagagtcagaaaaagtaggttagaaatttagcctacttttttctttgtccgacaggcatagtgtacatctgaggtccaagtcctctgtggatatttgctgcagatgaaaccaatagcgactcctaagcctgaatatcgtgaggtaggggggataggaaggaattagcgaaatcaaggttctacaaacagaatcgtgacttgaagccatatatagcggatgaggaactctaaaatccaaataggtgtcgtaacctatatacgtaaattacgagagtaaactaggaaagatgtacggcttattccgtgagcgtttaggacgtagtacaacgaatcatgggagtcagctgaacacatagtattgaagaaatttctgtaatggaaatggagcgaagaagtgaacaattaaatgaatacctctctaattaaatttgtcaattctaattcctggtatgaaaagacagtgacctgaaaatgtaaacgatgggagctgatcataaatataggacggtacatgcagtggtgttagagattagtccttacttgatttgtgataacttccccaaatttcttctgctatacttttctcaacttttaaaaatccaactaagaattttacctgggggtttgggggcggagcactaagttatcttatcgttagctgtcaaaactggtaggttttgataggctggcgatatgatttttgggatattgtggacacaatatctgagctcgcaaagccttacaagaatgaaaatcagttgttggaaaagtgtactgacattgtatggtagctcacattgtcagtacaagtattttggaaaggaagtagcagtatgaaacgagatgtgcgtgatattcggaaacaatttcgtttaacagaagcagaagaaaagcaaattctagctttgatgagagagcggggagagactaatttctctgattttcttcgtaaaagtttactttcctctgatttacaaaaacagatggagacatggtttgccctctggcaatcccaaaaactagaacaaatcagtcgtgacgttcatgaagttttaatcttggcacagtcagaacgtcaagtcacccaagagcatgtatctattctcttaacgtgcgtgcaggaattgattcaagaggttgcaaacaccatacccctcagtaaagaatttcgtgagaagtacatgaggtaagcacatggaacatcgttaccgaaccaatctcaagaaagtgtttttgtctgatagtgagttgaaccaactaaatataaatatcgatcaaagtggttgtaaatccttttctgaatatgcgagacgaactctactcgatcctggtatgaattttatcacgattgacacaaacggttaccaagatttagtgtttgagttaaagaggattggcaataatatcaaccagattgctcgaagtgttaatcaatctcagttaatttctggtgaagaattgcaggagttgaaaaaaggaattggtgaattgataaaagaagttgataaggaatttaatctgcaagcgcagaagctaaaggagttccatggtcatcactaaacactttgccattcacggaaagagttaccgcagaaagcttatcaagtacattctcaatcctgagaaaaccaataatcttgccttggtgtcggactatggcatgaagaattttctggactttcctagctatgaggaaatggtgcagatgtatcatgaaaatttcatcagcaacgatacgctttacgattttcgccacgacaggatggaagaaaatcaacgaaaaatacacgctcaccacatcattcagtctttctcgccagaggatcatatcactcctgaacaaatcaatcggataggttatgagactgtgaaggaattaactggtggcaaatttcgttttatcgttgcgacccatgttgataaagaccacctgcacaatcacatcattatcaattcagtagatagcaattctgacaaaaagctcaagtgggactacaaggtggagcgaaatcttcgcatgatttctgaccgtttttctaaaatcgcaggtgctaaaatcattgagaaccgctattctcaccagcggtatgaagtctatcgtaagactaatcacaagtatgaactcaagcagcgactctattttttgatggaacattctagggactttgaggatttcaaaaagaatgctccgctactacatgtggagatggatttccgtcacaagcatgccaccttttttattacggactcaactatgaaacaggtggtgcgtggcaagcaactcaatcgcaagcagccttacacagaagaattttttaagaactactttgccaaaagagaaatagaaagtctcatggaatttttattgctgaaagttgagaatatggatgatttacttcagaaagcaaaactttttggactaactatcaatcctaaacaaaagcatgtttcttttcaatttgcaggagtggaggtaaaggagacagagctagaccagaaaaatctttatgatgtagagtttttccaagattattttaaaaatagaaaagattggcaagctccagaaactgaggatttcgttcaactttatcaagaagaaaagttatccaaagaaaaagaacttccaagcgatgagaagttctgggagtcctatcaagagttcaagagtaacagagatgccgttcatgaatttgaggtggagttgtcactcaatcaaattgaaaaagtagtggatgatggaatttacgtcaaggtcaagtttggtattcgtcaggagggacttatctttgtgccgaacatgcagcttgatatggaagaggataaggtgaaggttttcatcagggaaaccagctcctactatgtctaccacaaagacgctgccgagaaaaattgttatatgaaaggtcgaaccttaattagacagttcagctatgaaaatcaaaccattccattacgcagaaaagcgacagtcgatatgattaaagagaagattgcggaagtggatgctttgattgaactggaagtagaaaatcaatcttatgtcacgattaaagatgagttagtgcatgaactagcagcgtctgaattgagaatcaatgagttgcaagaacgaatgtcaaccttgaatcaagtagcagaatatctactggcttcagttgaaagtaagcaagaaatgaaattaaatctttcaaaactgaatataactgagaatatcagtgctaatattgttgagaaaaaattgaagagcctggggaatcaactggaattggaaaggggcaggtatgaaaagatggtagtcaggctagataaatttataaatcgcttaaatacaggactttcaaaaggagatgggatagattttcaaaaataggaatctagccaataattatatacaatgtgtatcttttgtaaaatatatttgaaatttagatttaatcatgttacaattaacattgaaatcaaatagaaaaggaagatgcaaacgtgggtacactattagcaacaagattaaaaaatagacgaaaagaattaaaaatgtctcagcgagaattagctgagggtatctgtaaacaggggcaaattagtcgattagagagtggagagttcacccctggagcggattttttacatgcccttgctaagaaattaaaagttagtatggactacttttttgatgagcaggttgtagaggaagtcaatgagttatcagagtttaagaagttagcacagacatttatcacaaatcgtaattatgaatctttaaaatatatatatgaattggaaaatgtaaaagcccatcgcttatctctagcagataaattttacatggaatggataaagtctcttatagatttttatttttatggacagaaagaagaggcaattacacgattagagaatatgctacctcagttaaatgtatctgatttgaactaccttcaagtttcaaacactctattcaatttttattatgatattgaagatttagaacgttttaatgagattagagacaagctagagcatcaagtgaatcagcttaatttaaacacaattgaagagttagaactatcaattaagttcaattataacgtttgtcgatacctatggttacagaaaaatattgaagaagctattacgaaaatcacagctacgataaagcaatgtaaggagtacaggacaacttatctattagctgatttgtatttattgatgggaagtgtaagtgaaaatttttcttctaaaagttcagtaaaagaatattttgagactgctcattttctctacaaacttgaggaaaacatgtcaatggctttgaaagtcgaacattattttgcagatataacagaataaggaatacggtgttctagtgagcatcgttttttaaatctaatttgaatacaaaaaagtattaaataaaaaaaaataaaaaaagattataaaaatacttgacaagctaattttgaagtgataaaataaatgcaagaaaacgaaaggagaggtatatgagaagtttgtttaggaaaattgttgctttgttagtcataggattaatcctattagggactgctggaggaactcaagttcataagatggctagagggattgatccaggtcctgcgaatggtatttatagataggagattatagtcacttaaaaatcaaaaaattataaaatttttgttttacttaaatagatattttatgatgggcgaagtttttataactagttcctataagtacagaaacctattttaatttactaatttcaaaacaattttttgagatatatgtaattaaatctaaattaagctttaaaaaattatttttagcaatttgattttgaaagtgtcatgcagcaatatgaaagcgtagaatagaggtgtttccaatgtacaagtaagttttgattccaaataaagtaatagaaaaggagctatataatgagtagtcaaatgaaagctttcttgaatgaacttcaaggaaatatggaagttgttggagaattttttgataatcctgaaaaggtaattagaaaatttggaattgtcggaagagagaaggaagcattgctaatccgtgacttaaatgatatggatgattatgctctttcaattcaaaatagcgttgcatcgccttctggggcacatagtagcacttgccattttgttagacaagatttacaatccgcataattgttaatatataaaacataaaatttcaattttcaattagggataatagaattccttactatgatatagaaagtgaattaattaggaaatcttagtcagaggtttctgattaattcattttttatatattaagagtgatgtgaaatgttcaaattgtgagactactctcggattgttgtatagaaatttaaaattttattgtgagctttttaaggaagagtggccgatatgaaaaataaatacgatgttaaaagaattattccggatgaattatcagaatcactagatatttttctaaaaaattattctgaaactggattgtcagattataatacttatctcttttatggttttatcttgaagtcctataaattgcctcgagaaaatagatatagcataaaattattggtgaaggaattacaaaatagaggactgaaagttacattgattatcaacatttattatcacgctttaaattgtttggctttaaatgatggtctaaaaatttatggagaagatttcttaatatgaattacgaaaagtatttaaactatttggactatgaaactgaaatagaagacgcataccataatttattattagaatataaaattagtgataattttagtgatgaacattggttatataatttgccgtctaatatcacccaatctaagggatttaaaatacacctgagcgcttcaatattaaatgctaatttggttgctaaaaaattctttgattttatattttctagagagaagaagataaatttcaaaattttggttagcattaaagaactttctttgcaaaatacagggcttaatggttattcacaagtcgggaaattcattacaatttatccaaaagataataaagagtttcaacgtttgttacacaaattagaaatattgtataaaggtgtaaagggtgtaaacataccatcagatttcagatttcaacttagcgaggttgtatattacagatatggggagttcgtaaaagatagcactttcaaggataaaagagataagaaaatcccttcaaatgtgaatgttccaataagggattactatattccaagatataacactattcctgatcaatatattattttggaagtgatttctaaaaatgccaaaggtggagtttataaagtatttaatactcaaaagcgagtttattctttattaaaagaagctagtgatttatcgttggttgattttacaaatagagattctgtgaatcgtttaataaatgaaagagaaatattagtagaattggaaaaggaggaatttactccaaaagtttttaacgatttttacataaagaattcgtattttgtggaatttgagtttattattgcagataaattaagcgagtataatatggttagtggctcgtatgattggtttttaacattaattgattatatggagataataaactccaaatataatctttcctatagagatttatcatttaataatatacttattgataatagaaataatatttatattatagactttgagcatgccctaaggaaagaaactcaaattgaagaaaaaaagttgcctctatttggaactccagggttttatgaaaccaacttaaatttattgaataatcaaccagaggatattatgggattggttttgttattatattggagtcagaatttagatgattttaacgtcttttcaaaaatgagttttttagaagcgatggagtatgcaatgaattttaattcgcgtcgcttagacacacttgataaatcagattggctttatgatatttataaaaaagcgttcaattataaatatgatactttttctgaattaaaaaaagattttatagaggtattaaaataaaggtaggggtgttatgaattgtttcttgaaaatgaataatgtaagtgttcgttatgatgacgtaatagctttaaaagatataactttacaaataaataagggagatttcattggcttattaggttcaaatggtgcaggtaaatctacgttaattaattctattgtaggttttcaagagatttatttaggagaaatagagtattgtgataaagatttgatagttagttctcaaccttttgctcatttaggctttactcctcaaaccacagtaattgatttttatactactgtgaaggacaatgtaatattggggctgaaccttgctggaaagtttgggaaaaatgctgagaagttgtgtcaaatagccttagaaattgttgggttagctgataaaaaaaataatttggtagaaacattgtcaggtggacaactgcaacgcgtccagattgctagagcaatagctcataatccagatttttatattttagatgaacctaccgttggtttagatactgaatctgccgaaaaatttttaatgtatttaaaagataagagtttggaaggaaaaactattatcatatcttcacatgacataaatctactcgaaaagttttgtaaaaaaatactttttttacaaaatggctccatatcattttttggtgatatgcgtgactttgtagataattcaactatcaaattaaatttttcaatgcagaatagaatttctagatatcaaattgaatttttagaaaattttagatttaaagttcacatcgaagataatgatagttttacaatagaagtccctatagaagaaaagatcttagatgttatcaatgaggtaggaaaagcatgtgaaattaaaaacttttcaacaagtaaattaaccttacaagaaagttatttgcaaagaataggaggagaaaaatgaaggctgatcaattaaggcacaaatcggacttaggtttaagaggtctagcgattattgctaaaaatgagattattgctttttttagaagtaaaggtttaattatttctcagtttctacaaccaatcttatatgttgtttttataataataggattaaattcttcgataaagaacattcagtttaatgatataaaaacctcttatgcagaatatacaatcattggtgttatagctttattgataatcgggcagatgactcaagttatttatagggtgacaatagataaaaaatatgggctacttgctcttaagttatgcagtggagttcgtcctttatattatattttagggatgagtatctattctatattagggttgatagttcaagaaattattatatatataattacgttagcgtttgagataaatatcgcaatggatagatttttttatacagttttgttatctattgttgttttattattttgggactcccttgcaattttacttacaatgtttatcaatgattacagaagacgtgatattgtaatacgttttgtactaacaccgcttggttttacagctcctgttttctacttaatagattctgctcctagtattgtgagatggattggtcagttaaatcccttaacttatcaattaactattttgagaaacttttattttaaaaattcaacaactttggaattagttttcttattgttaacatcattacttgtccttatatctgtatcttttattataccaaagataaaattgatactgatagaaagataaaagttgggtcatccaacttttttgttgtctcccgaaaaccactagctatgctagtggttccatagagcttttagcgtggtaacaaaaagaacctcctaaaatgataagatagaagtggtttctccgccactacaacatatcatacaggaggtacctcatgagagaggataatcaaagtttatcacataccacatggaattgtaaatatcatattgtttttgcacccaaatatcgtcgtcaaatcatttatggcagatacaaagctagtatcggaagaatcatacgtgacttatgtgagcgtaagggtgtaataatccatgaagcgaatgcttgttcagaccatattcacatgcttatcagtattcctccgaaacttagtgtttcgtcctttatgggctatttaaagggcaagagcagtttgatgatttttgataagcatgcgaatttaaaatacaaatatggcaatcgcaagttttggtgtagaggctattatgtagatacggtaggccgtaatcagaaagtgatagctgaatatattcagaatcaattacaagaagacagagtagcagaccagctcacgttattcgagtcagtagatccgtttactggcgaaataaataagaggaagtaactaaggtgctttagcacctgctcgggaaagtggtgcgcgaggaagctatttcggtgggcctttggccctggccggtagaagcggcttatagccgcagaacaaaccaccagttcacactggtggttttgatttaaaaaacttgatacataaaaataaaagtctatataaaggatggtaaaattcctgttgtccgatttggacaatatcctaaatagttacaatatatggtctatactttttcttaggagaaagctagatgtacagacgtttgagagatttgagggaggatcatgatctgccccaaaagcaaatagctacaatactttcgtttacaaattcagcttatgccaaaattgaacggggtgagcatgcgttgacggctgatgtattggttaaactctcagatttctatgacgtcagtacagactatttattgggattaactgattttcctgataaaattcgctttagaaaataatctcctcaatttcatagagtttgaaaatgagtgagattttttatttgccctttgacaactgaatagcctaaaatggtactttcctcatttgtggagcaaatttgaatggctcgccatgataagagcgattttaaaatcatcaataaaatagagcgatactttatatgccatgatacaaatgatatacaatgatacttctgaccgttcagcctgccaacgtaaaagagcagcaagtgaaattcttatgatgacttcatcagtcatgccacgttgaatgtgtgagtttgttagataaacgcaattaatcctcaaaaggttccccgaaccttttgagttctacagacgcatcacgtggagtgtgtaagcttgttgctaaaagcgtaaaaaccttggaacgaaaggaataatagactttctgcgaaacaaaaatataatacaataaaactatgaatgatgaagcaagtaaacaattgagcgatagccgtttcaagatccttgtaggtgttcagcgcacgacttttgaagagatgttagctgtgttaaaaacagcttatcaacgtaaacgcgcaaaaggtggacgaaaaagcaaattaagcctagacgatctccttatggtaactattcaatacatgcgagaatagagcacttatgaacaaattgcggctgattttggcattcacgaaagcaacttaatccgtcggagtcaatgggttgaagcaactcttattcaaaatggttttacgatttcaaattctgccttaattctgtaaaaacagtaaaattcgaaggattgtaaggtaagagtttttttctttctgaaaaaatggtataatagcaatcaaaactagaaaataaaacggaatttggaacagatttgtctgtatcctagtagagtggtgatactatgaagattagtaagaggcacttattaaattattccatcttgattccctacttgcttttatctattttgggcttgattgtggtctattcgaccaccagtgctattttaattgaagaaggcaagagcgccttgcagttggttcgaaaccaaggaatcttttggattgttagtttgatactgattgccttaatttataaattgagactagattttttgagaaatgagcgactaatcattttagttatattaatagaaatgcttttattgttcttggctcgttttattggtatttccgtaaacggggcatacggttggatttcggttgcaggaataactattcagccagctgagtacttaaaaatcattattatttggtatttagctcaccgattctccaaacagcaagaagaaatagctacttatgattttcaagttttgactcaaaatcaatggcttccccgtgcttttaatgattggcgattcgttctcctagttctgattggaagtttgggaattttccctgatttaggaaatgcgactattttagtcttggtttccttgattatgtatacagttagtggaatcgcttatcgctggttttcaaccattctggcgctcgtatctgccgcttctgtctttgtcttgaccactatcagcctaatcggtgttgagaccttttcaaaaattccagtattcggctatgtagccaagcgctttagtgccttttttaatccttttgccgatcgtgctgatgcaggtcaccagttagctaattcttattttgccatggtcaatggcggttggtttggtctaggtcttggaaactcgattgaaaaacgaggttatttgccagaagctcatacagactttgtcttttctatcgtgattgaagaatttggctttgttggtgccagtcttattttagctctcttgtttttcatgattttgcggattatcttggtcggtatccgagcggagaatcctttcaatgccatggttgcactcggtgtcggagggatgatgttggttcaggtatttgtcaatatcggagggatttcgggcttgattccatctacaggagtgactttccccttcttatcccagggtggaaatagtcttctagtcttatcagtggcagtagcctttgtcttaaatattgatgccagtgaaaaacgcgctaaattgtaccgagaattggaaaatcaaccaatgaaccttctgttgaagtaggataaagaaaggatagtttatgtctcttcaaaaattagaaaattatagtaataaaagtgttgtgcaagaagaagtcttgattctaacagaattactggaagatattactaaaaatatgcttgccccagagacctttgaaaaaataatacagttgaaagaattatcaacgcaggaagattatcaaggtctaaaccgtctagtgactagcttatcaaatgatgaaatggtctatatttcacgctatttctctatcttgcctcttttgattaatatttcagaggatgtggatttagcttatgaaatcaatcatcaaaataatattgatcaggactatttaggtaaattatctacaacgattaaattggtagcagaaaaggaaaatgccgttgagatcctagaacacttgaatgttgtccctgttttgacagcccatccaacacaagtgcaacgcaaaagtatgttggatttaacaaatcatattcatagtcttttgcgtaaataccgtgatgttaagttggggttgatcaataaagataaatggtacaatgatttgcgtcgttacatcgaaattatcatgcagacagacatgattcgtgagaaaaaattaaaagtgactaacgaaatcacgaatgctatggaatattataacagctcctttttgaaagctgtacctcatttgacgacggagtataagcgcttagcgcaagcgcatggtctgaatttaaaacaggctaaaccaatcaccatgggtatgtggataggtggtgaccgtgatggaaatccatttgttacagcaaagaccttgaagcagtctgcactcactcagtgtgaagtcatcatgaactactatgataaaaagatttaccaactttatcgtgaattttctctttcaactagcattgtcaacgtcagcaagcaagtcagagaaatggctcgtcaatccaaggataactcgatttaccgcgaaaaagagctttaccgtcgtgccttgtttgatattcaatcaaaaattcaggcaactaaaacctatctgattgaggatgaagaagttgggactcgttatgaaaccgccaatgatttctacaaggatttgattgccattcgagattctctactagaaaataagggcgagtccttgatttcaggtgattttgtggaattattgcaggcagtagagatatttggtttttacttagcatcaattgatatgcgacaagactctagcgtctatgaagcctgtgtggcagaactcttgaaatcagcaggaattcattctcgttatagcgagttgagcgaagaagaaaagtgtgaccttctcttgaaagaattagaagaagatccccgaattctttctgcgactcacgcagaaaaatcagaattattagcaaaagaattagctatttttaagacggctcgtgttttgaaagataagttgggagatgatgtcatccgtcagaccatcatttcacatgcaaccagcctttctgatatgctagaattagctattctgttaaaagaagtaggactggtggatacggaaagggcgcgtgttcagattgttcccctttttgaaacaattgaagacttggatcattcagaggaaacaatgagaaaatatctttctcttagccttgccaaaaaatggattgactcacgaaataactaccaagaaatcatgcttggctactctgacagtaataaagatggcggttacttgtcatcatgttggaccctctacaaggctcaacaacaattgactgctattggagatgaatttggcgttaaggttaccttcttccatggtcgtggtggtactgtcggtcgtggtggtgggccaacctatgaagccattacatctcaaccgctcaagtctatcaaggatcgtatccgcttgacggagcagggtgaagtaattgggaataaatacggtaacaaagacgccgcttactataaccttgaaatgctagtatcggcagctattaaccgtatgattactcagaagaagagcgataccaataccccaaatcgttatgaaaccattatggatcaagtagtggaccgtagttacgatatctaccgtgatttggtctttggtaatgagcatttctatgattatttcttcgagtcaagtccaatcaaggctatttcaagttttaatattggttctcgtccagccgctcgtaagactattactgaaatcggtggtttgcgtgccatcccttgggtattctcatggtcacagagtcgtgttatgttccctggatggtacggggttggttcaagcttcaaggaatttatcaataaaaatccagagaatattgctatcttacgagatatgtaccaaaattggcctttcttccaatcgcttctttcaaatgttgatatggttttgtcaaaatcaaatatgaatattgcttttgaatatgctaaactttgtgaagacgagcaagttaaggccatctatgagactattttaaatgaatggcaagttactaagaacgttatcttggctattgaaggacatgacgaactcttagctgacaatccatatctaaaagctagtctggattaccgtatgccttactttaatattctcaactatattcagttggagttgattaaacgccaacgtcgtggagaattgtccagtgatcaagaacgattgattcatatcaccatcaacggaattgcgacaggattgcgtaattcaggttgataattttcaagagtgaatgctaaaagtgaatatcaaaaaaattctaatagactattgacaagtagtttaaaaatgatataatttaaccattcagaaaagtaatcatacaaactttttagagagtctgtggtagctgaaaacagataagtggcaatgatgaaaattgggctgaatgctatttagaatttgaaattataaaaattcggtaagcacaccttacagtgcatctcgttattgcgagactgagcgatagggaaattccctataattgaggtggtaccgcgcatcgacgtcctcacacaagttttttgtgtgaggatttttttgatggaggttagtatggaaagaaaacgatggcgtcgcttgtttagataagtgaaatatgttaaaggaaataaaaaggagaaacagaatgaaaaataaacgtttaattggaattattgctgcattagcagtcttagtagcaggaagcttgatttattcttcaatgaataaatcagaagctcagaataataaggatgagaagaaaataaccaagattggtgtgcttcaatttgtgagccatccatcccttgatttgatttataaagggatccaagatggacttgcagaagaaggatataaagatgatcaagttaaaattgattttatgaactcagaaggtgaccaaagtaaggttgcgacaatgagtaaacaattggttgcaaatgggaatgaccttgtggttggtatcgcaacaccagcagcccaagggttggctagtgcaacaaaagacctaccggttatcatggccgctattacagacccaattggtgctaacttggttaaagatttgaaaaaaccaggtggcaacgttacaggggtatctgaccacaatccagctcaacaacaagttgaactcatcaaggctctgacaccgaatgtgaaaacaatcggagctctttactcaagtagcgaagacaattcaaaaacacaggtcgaagaatttaaggcttatgctgaaaaagcaggtctgacagtggaaacatttgcagttccttcaacaaatgaaattgcctcaactgtcactgttatgactagcaaggtagatgctatttgggttccaattgataacaccattgcatcaggatttccaacggttgtctctagcaatcaaagttctaagaaaccaatttatcccagtgcgacagctatggtagaagtaggtggtttggcatcagttgtaattgaccaacatgaccttggtgtggcaacaggtaaaatgattgtgcaagtcttgaaaggtgcaaaaccagccgataccccagtcaatgtcttttcaactggtaagtcagtcatcaataaaaaaatagcacaagaactaggtattactattcctgagtctgttctcaaagaagcaggacaagtcatcgaataaataaggtagggaggaggagactcttcccattttttaaaaagatgaatatagaaaggattaaataaaatatgattgtttccattatttctcaaggatttgtctgggctattctaggtctgggaatctttatgacatttaggattttaaactttccagatatgacgacagaaggttccttccctcttgggggagctgttgctgtcactttgataaccaaaggcgtgaacccatttttagcgacacttgttgctgtaggagcaggttgtttggctggaatggcagcaggccttctttatacaaaagggaagatcccaaccttgctctcagggattttggtgatgacttcttgtcactcaatcatgctcttgattatgggacgtgcgaatttaggcctgcttggaaccaagcaaattcaggatgttttgccttttgattcggatttgaatcaactcttgacaggtctcatctttgtgagtattgttattgctctcatgctctttttcttggacactaaactcggacaagcctatattgctacaggggataatcctgatatggctagaagtttcgggattcatactggacgcatggagctcatgggcttggtcttatcaaatggtgtgattgcccttgcaggtgccctcattgctcagcaagaaggttatgccgatgtgtctcgagggatcggggttatcgttgtggggcttgcaagtttgattattggagaagttattttcaagagtttgagcttggcagagcgtttggttactatcgttgtaggttctatcgcttatcaatttttagtgtgggcagttatcgcacttggctttaatacaagttaccttcgtttatacagtgccttgattttagcagtctgcctcatgattccaacatttaagcaaacaatcttgaaaggagccaagttaagcaaatgacagcaattgtagaattaaaaaatgcaaccaaaatcgttaaaaatggctttgatgaagaaaagattattttaaatgatgtttccttagaaatttttgaacgggactttatcacgattttgggcggaaatggtgctggaaaatcaactctctttaacactatagcagggaccttatcactaactagtggaactatccgtattttaggtgaagatctcactaagttttcacccgagaagcgtgccaagtacctgtctcgtgtcttccaagatccaaagatggggacagctccccgtatgacggtcgctgaaaatcttttaatcgccaagtttcgtggtgaaaagcgtggattgttaccacgacgcttgactagctataaggatgaatttcaggcaaccattgaaaaagtaggaaatggtcttgagaaacacttgaatacaccgattgagttcttatcaggtggacaaagacaggctttgagtctcttgatggcaaccttgaagcgacctgaattactcctgttagatgagcatactgctgccctggatccaaagactagtgttgctttgatggaattgacagatgaatttgttaagaaagatcagctaacagcccttatgattactcatcatatggaagatgctctcaaatacggcaatcgcttgattgtcatgaaagaaggacgaattatccaagatttaaaccaagaagaaaaagcaaaaatgaaaatctctgattattatcaactctttgaataaagtagggaaaatgagtgaaatggtttactttttttctgaaataaagtatactatataaagtaaactatgataacatggaggtattgtgtatggttgacaaacaagtcattgaagaaatcaaaaacaatgccaacattgtggaagtcataggagatgtgatttctttacaaaaggcaggacggaactatctagggctctgtccttttcatggtgaaaaaacaccatctttcaatgttgtagaggacaagcagttttatcactgtttcggttgtggtcgctcaggtgatgtctttaagttcatcgaggagtaccaaggggttccctttatagaagcagtccaaatcttaggtcagcgtgttggaattgaggttgaaaaaccgctttatagtgagcagaagtcagcctcacctcaccaagctctttatgatatgcacgaagatgcagccaaattttaccatgctattctcatgacaacgactatgggcgaagaggccagaaattacctttatcagcgggggttgacagatgaagtgcttaaacatttttggattggtttagcacctccagaacgaaactatctctatcaacgtttgtctgatcagtatcgtgaagaggatttactggattcaggcctgttttatctctcggatgccaatcaatttgtagacacctttcacaatcgcattatgtttcccctgacaaatgaccaaggaaaggtcattgccttctcaggtcgtatctggcaaaaaacggattcacaaacttctaagtataaaaacagccgatcgactgcaatttttaacaaaagttacgaattatatcatatggatagggcaaaaagatcttctggaaaagctagtgagatttacctgatggaaggattcatggatgttattgcagcctatcgggctggaatcgaaaatgctgtggcgtcgatgggaacagccttgagtcgagagcatgttgagcatctgaaaaggttaaccaagaaattggttcttgtttacgatggagataaggctgggcaagccgcgacattgaaagcattggatgaaattggtgatatgcctgtgcaaatcgtcagcatgcctgataacttggatcctgatgagtatctacaaaaaaatggtccagaagacttggcctatctattaacgaaaactcgtattagtccgattgagttctacattcatcagtacaaacctgaaaacagtgaaaatctgcaggctcagattgagtttcttgaaaaaatagctcccttgattgttcaagaaaagtccatcgctgctcaaaacagctatattcatattttagctgacagtctggcgtcctttgattatacccagattgagcagattgttaatgagagtcgtcaggtgcaaaggcagaatcgcatggaaggaatttccagaccgacgccaatcaccatgcctgtcaccaagcagttatcggctattatgagggcagaagcccatctactctatcggatgatggaatcccctcttgttttgaacgattaccgtttgcgagaagactttgcatttgctacacctgaatttcaggtcttatatgacttgcttggccagtatggaaatcttcctccagaagttttagcagagcagacagaggaagttgaaagagcttggtaccaagttttagctcaggatttgcctgctgagatatcgccgcaggaacttagtgaagtagagatgactcgaaacaaggctctcttgaatcaggacaatatgagaatcaaaaagaaggtgcaggaagctagccatgtaggagatacagatacagccctagaagaattggaacgtttaatttcccaaaagagaagaatggagtaataatggcaacaaaacaaaaagaagtaacaacatttgacgtacaggtagcagaatttatccgtaatcataagcaaaaagggacagcaacagatgatgaaatcaatgcaagtctggttattccttttaccttggacgctgatgggattgaagatctcttgcaacggattcaggatgcaggcatttctatcacagataacgaaggaaatccaagtgcgcgtgttctcagcaatgaagaagaaccagaactcagcgatgaggacttgattgggtcaacttctgctaaggtcaatgaccctgtccgtatgtacttgaaagaaataggggtcgttcctctcttgaccaatgaagaggagaaagagttggcactggctgttgaagctggtgatatcgaagccaaacaacgtcttgcggaagccaatcttcgtttggttgtttccattgccaaacgctatgtcggtcgtggtatgcagttccttgacttgattcaagaaggaaatatgggcttgatgaaggcggttgacaagtttgactattctaaagggttcaagttttcaacttatgcaacttggtggattcgtcaggctatcactcgtgctattgcggaccaagctcgtaccatccgtatcccagttcacatggttgaaactatcaataaattggttcgtgaacagcggaatctccttcaagaattggggcaagatccgacaccagaacagattgctgaacgaatggatatgacacctgataaggttcgtgaaatcttgaagattgcccaagaaccagtatctcttgaaactcctatcggtgaagaggacgatagccaccttggagactttatcgaagatgaagtgattgaaaatccagtggattatacgactcgtatcgtcttgcgtgagcaattggatgaaatcttagatactcttacagaccgtgaagaaaatgttctgcgtctacgttttggactagatgatggaaaaatgcgcacacttgaagatgtggggaaagtctttaacgtaactcgtgagcgtatccgtcagattgaagcaaaggctttgagaaaactacgccaaccaagtcgtagcaaaccgcttcgtgattttattgaagactaagagtgaggaaaatatggcttatacagaagagcaaattgaaaacatcaaaacacggattttaacagccttggaagaagtcatcgaccctgagttgggaatcgatattgtcaatcttggtttgatctatgagattcgttttgacggtgacacagggcaaacagagattgacatgactttgacaactatgggttgtcccttagcagaccttttgacagaccagatttatgatgctatgatagaggttccagaagtaacggatactgaggttaaattagtctggtatccagcctggacagttgaaaaaatgagtcgctatgcccgcattgccctaggcattaagtaaacatataaaagcatgtgagagactgttggaaaagcgaggaaatttcccctcttttcctctagtctctcctttcttttgctgattttattcaaagaaaatgatataatagtagttatggagaaaaagaaattacgcatcaatatgttgagttcaagtgagaaagtagcaggacagggagtttcaggtgcttaccgtgaattagttcgtcttcttcaccgtgctgccaaggaccaattgattgttacagaaaatcttccaatcgaggcagatgtgactcactttcatacgattgattttccctattatttatcaaccttccaaaagaaacgctcagggagaaagattggctatgtgcatttcttgccagctacacttgagggaagtttgaaaattccatttttcttaaagggaattgtgaaacgctatgtattttctttttacaaccggatggagcacttggttgtggtcaatcctatgtttattgaggatttggtagcagctggtattccacgtgaaaaagtgacctatattcctaactttgtcaacaaggaaaaatggcatcctctaccacaagaagaggtagtcagactgcgcacagatcttggtcttagtgacaatcagtttatcgtagtaggtgctgggcaagttcagaaacgtaaagggattgatgactttatccgtctggctgaggaattgcctcagattacctttatctgggctggtggcttctcttttggtggtatgacagatggttatgaacactataagaaaattatggaaaatccccctaaaaatttgatttttccaggcattgtatcgccagagcggatgcgcgaattgtatgctctagcggatcttttcttgttgcctagttacaatgagctctttcctatgactattttagaagctgcgagttgtgaggctcctattatgttgcgtgatttagatctctataaggtgattttggagggaaattatcgggcgacagcgggtagagaagagatgaaagaggctattttggaatatcaagcaaatcctgctgtcttaaaagatctcaaagaaaaggctaagaatatttccagagagtattctgaagagcatctgttacaaatctggttggacttttatgagaaacaagccgctttagggagaaagtaaaaagtgaggtaatctatgcgaattggtttatttacagatacctattttcctcaggtttctggtgttgcgaccagtattcgaaccttgaaaacagaacttgaaaagcagggacatgctgtttttatctttacgacgacagataaggatgtcaatcgctacgaagattggcaaattatccgcattccaagtgttcctttctttgcttttaaggatcgtcgctttgcctaccgaggttttagcaaggcacttgaaattgctaaacagtatcagctagatattatccatactcagacagaattttctcttggcctgttggggatttggattgcgcgtgaattgaaaattccagtcatccatacctatcacacccagtatgaagactatgtccattatattgctaaggggatgttgatccggccgagtatggtcaagtatctggttagaggtttcctgcatgatgtggatggggttatttgccctagtgagattgtccgtgacttgctatctgattataaggtcaaggttgaaaaacgggtcattcctactgggattgaattagccaagtttgagcgtccggaaatcaagcaggaaaatttgaaagaactgcgtagtaaactagggattcaagatggtgaaaagacgttgcttagtctttcgagaatctcctatgaaaaaaatattcaagcagttttagcagcctttgctgatgttctgaaagaggaagacaaggttaaactggtagtagctggggatggcccttatctgaatgacctcaaagagcaagcccagaacctagagattcaagactcagtcatctttacagggatgattgctcctagtgagacggctctttactataaagcggcggatttcttcatttcggcatcgacaagcgaaacgcaaggtttgacctacttggaaagcttagccagtggaacacctgtcattgctcacggaaatccttatttgaacaacctcatcagtgataaaatgtttggaaccttgtactatggagaacatgatttggctggtgctattttggaagccctgattgcaacaccagacatgaacgagcataccttatcagagaaattgtatgagatttcagctgagaactttgggaaacgagtgcatgagttttatctggatgccattatttcaaataacttccagaaagatttggctaaagatgatacggtcagtcagcgtatctttaagacagttttgtatcttcagcaacaggtggttgctgtacctgtaaaaggatctagacgcatgttgaaggcttcaaaaacacagttgatcagtatgagagactattggaaagaccatgaagaatagaaagaggaacagctatgaaaaaaacaattaatgagaagcggtcgtgataaaaagattgcgggtgtttgtgctggggtggcccattatctggatatggatccgactatcgttcaagtcatttggggtgttcttacttgctgttacggagctggaattgtagcttacattattttatggattatcgcaccagtagcaactgactattgaaaactagctcaattcatgctaagataatagaaaatagaatgtaacgaaggagagaaaaatggcatttggagataatggaaatcgtaaaaaaactatgtttgagaaaataaccttgtttatcgtgattatcatgctagtagcaagtttattgggaatttttgcaactgcaattggtgccctcagtaatctataaaatagattcaagaaaatttagtgactgggatttcccagcccttttttaaagtgagaagaaataatgagtatgtttttagatacagctaagattaaggtcaaggctggtaatggtggcgatggtatggttgcctttcgtcgtgaaaaatatgtccctaatggaggcccttggggtggtgatggtggtcgtggaggcaatgtggtcttcgttgtagacgaaggactacgtaccttgatggatttccgctacaatcgtcatttcaaggctgattctggtgaaaaagggatgaccaaagggatgcatggtcgtggtgctgaggaccttagagttcgagtaccacaaggtacgactgttcgtgatgcggagactggcaaggttttaacagatttgattgaacatgggcaagaatttatcgttgcccacggtggtcgtggtggacgtggaaatattcgtttcgcgacaccaaaaaatcctgcaccggaaatctctgaaaatggagaaccaggtcaggaacgtgagttacaattggaactaaaaatcttggcagatgtcggtttagtaggattcccatctgtagggaagtcaacacttttaagtgttattacctcagctaagcctaaaattggtgcctaccactttaccactattgtaccaaatttaggtatggttcgcacccaatcaggtgaatcctttgcagtagccgacttgccaggtttgattgaaggggctagtcaaggtgttggtttgggaactcagttcctccgtcacatcgagcgtacacgtgttatccttcacatcattgatatgtcagctagcgagggccgtgatccatatgaggactacctagctatcaataaagagctggagtcttacaatcttcgcctcatggagcgtccacagattattgtagctaataagatggacatgcctgagagtcaggaaaatcttgaagactttaagaaaaaattggctgaaaattatgatgaatttgaagagttaccagctatcttcccaatttctggattgaccaagcaaggtctggcaacacttttagatgctacagctgaattgttagacaagacaccagaatttttgctctacgacgagtccgatatggaagaagaagcttactatggatttgacgaagaagaaaaagcctttgaaattagtcgtgatgacgatgcgacatgggtactttctggtgaaaaactcatgaaactctttaatatgaccaactttgatcgtgatgaatctgtcatgaaatttgcccgtcagcttcgtggtatgggggttgatgaagcccttcgtgcgcgtggagctaaagatggggatttggtccgcattggtaaatttgagtttgaatttgtagactaggagactggtatgggagataaaccgatatctttccgagatgcggatggtaattttgtttccgccgcagacgtttggaatgaaaagaaattggaagaactatttaatcgtctcaatccaaatcgtgccttgagattggcacgaactaaaaaggaaaatccatctcagtaaagaagctaaaaaatcccgtgcctcatcagacacgggattttgtggtacgacaggcatgtatagcaaactgaatctggaatagcacagcatatcttctaaaatatagtaaaatgaaatgagaacaggacaaatcgatcaggacagtaaaatcgatttctaacaatgttttataagcagagatgtactattctagtttcaatcaactatattgttataaattgatttgaatttcaaaattaaattgtttgattcttatttcaatttgttatagtatatctgatgtcaaagttctcggcgagtcaaatagcgattcccaagcctgactatcgtgaggtagcggattaaaatggtctggggatagaccgttttaagtctgacgctggaaataagaattgtcagaagaagggatagcgaaatcgtggctctacgaacaggaacgtgataataaggcgtatatagcggataagagggcatcaaactctaaagtccaaaaaggtagtcgtaacctatatgcgtaaatcacgagagtaattgaattcgtactaagattttctattttcactgtaaccttttaacgcccttatatcttgtatacacgaggaaagatgtacgacttatcccgtgaggtctatcactataaagagaaaacgacagatagaagtgatcctgagtcacggttatctgtctgataggacggtatgtataaaacgcttctgtgaactgagagaagggggagaagttcttgctaaaatttagttgaacagccgtattccgatacttagataagagatctagtcttagctcctactcagttttaggggataaaaaaggggcaatagcgattcgagaaagattatactcttcgaaaatctcttcaaatcacgtcaatatcgccttgtcgtatgtgtaggatactgactacgtcagttccatctacaacctcaaaacagtgttttgagcaacctgcggctagtttcctagtttgatctttgattttcattgagtattagtaattcagttactaactcgtcaactctgatttatccaataaaattgaaaaggatggaaaaaaggataaatttatgatatactttattttgaagaccttattagaaatcttgaaagagtattgaaaacttagaatgagaaaaattgttatcaatggtggattaccactgcaaggtgaaatcactattagtggtgctaaaaatagtgtcgttgccttaattccagctattatcttggctgatgatgtggtgactttggattgcgttccagatatttcggatgtagccagtcttgtcgaaatcatggaattgatgggagctactgttaagcgttatgacgatgtattggagattgacccaagaggtgttcaaaatattccaatgccttatggtaaaattaacagtcttcgtgcatcttactatttttatgggagcctcttaggccgttttggtgaagcgacagttggtctaccgggaggatgtgatcttggtcctcgtccgattgacttacaccttaaggcgtttgaagctatgggtgccactgctagctacgagggagataacatgaagttatctgctaaagatacaggacttcatggtgcaagtatttacatggatacggttagtgtgggagcaacgattaatacgatgattgctgcggttaaagcaaatggtcgtactattattgaaaatgcagcccgtgaacctgagattattgatgtagctactctcttgaataatatgggtgcccatatccgtggggcaggaactaatatcatcattattgatggtgttgaaagattacatgggacacgtcatcaggtgattccagaccgcattgaagctggaacatatatatctttagctgctgcagttggtaaaggaattcgtataaataatgttctttacgaacacctggaagggtttattgctaagttggaagaaatgggagtgagaatgactgtatctgaagacagcatttttgtcgaggaacagtctaatttgaaagcaatcaatattaagacagctccttacccaggctttgcaactgatttgcaacaaccgcttacccctcttttactaagagcgaatggtcgtggtacaattgtcgatacgatttacgaaaaacgtgtaaatcatgtttttgaactagcaaagatggatgcggatatttcgacaacaaatggtcatattttgtacacgggtggacgtgatttacgtggggccagtgttaaagcgaccgacttaagagctggggctgcactagtcattgctgggcttatggctgaaggtaaaactgaaattaccaatatcgagtttatcttacgtggttattctgatattatcgaaaaattacgtaatttaggagcggatattagacttgttgaggattaaaccgtagaggtgtttatgaatatttggaccaaattagcaatgttttctttttttgaaacggatcgcttgtatttgcgtcctttcttttttagtgatagtcaggacttccgcgagatagcttcaaatccagaaaatcttcaatttattttcccaacgcaggcaagtctggaagaaagtcaatatgcactggccaattactttatgaagtcccctttgggagtgtgggcaatttgtgaccagaaaaatcaacaaatgattggttctattaaatttgagaagttagatgaaatcaaaaaagaagctgagcttggctattttttgagaaaagatgcttggtcgcaaggatttatgacagaggttgttagaaaaatttgtcagctttcttttgaggaatttggcttaaaacaattatttatcattacccaccttgaaaataaagctagccaaagagttgctcttaagtctggatttagtttgttccgtcagtttaagggaagtgatcgttacacaagaaaaatgcgggattatcttgaatttcggtatgtaaaaggagagttcaatgagtaagcatcaggaaattctaagctatttggaggaattaccagtaggtaaaagggtcagtgttcgtagcatttcgaatcatctaggagttagtgatggaacagcctatcgggctattaaagaagctgaaaaccgtggaattgtggagacccgtcctagaagtggaacaattcgtgttaaatcccagaaagttgctatagagagattaacgtttgctgaaattgcagaagtgacttcttctgaggttctggctgggcaagaaggtttagagagagaatttagtaagttttcaattggtgccatgactgaacaaaatatcttgtcttaccttcatgatggggggctcttgattgtcggagaccgaacccgtattcagttgctagccttggaaaatgaaaatgcagttctggttacagggggatttcaggttcatgatgatgtgcttaaactggccaatcaaaaagggattcctgttctaagaagtaagcatgatacctttaccgtcgcgaccatgatcaataaagccttgtcaaatgtccaaatcaagactgatattctgacagttgagaaactttatcgccctagtcatgagtatggttttctgagagagacagatacagttaaagattatttggacttggttcgtaagaatcgtagcagccgtttccctgttatcaatcaacatcaggtcgttgttggtgttgtaaccatgagagacgctggtgataaatcaccaagcacgacaattgataaggttatgtctcgtagtctatttttggttggattatcgacaaatattgccaatgtgagtcaacggatgatcgcagaagactttgaaatggtaccagttgttcgaagcaatcaaactttgcttggcgttgtgacgcgacgagatgtcatggagaagatgagccgttcccaagtttcggctctaccaactttttctgagcagattggacaaaagctctcttatcaccatgatgaagtagtcattacagtggaaccctttatgctagaaaaaaatggagttttggctaatggtgtattggcagaaattctgacccacatgacccaagatttagttgttaatagtggtcgcaatctcattatcgagcagatgctgatctactttttgcaggctgttcagatagatgatatattgcgcattcaggcacggattattcatcatacgagacggtcagctataattgattacgatatttatcatggtcaccagattgtttcaaaagcaaatgtgactgttaaaattaattagaaactaggagaaaagatgataacattaaaatcagctcgtgaaatcgaagctatggacaaggctggtgattttctagcaagtattcatataggcttacgtgatttgattaagccaggcgtagatatgtgggaagttgaagaatatgtccgccgtcgttgtaaagaagaaaatttccttccacttcagattggggttgacggtgccatgatggactatccttatgctacctgttgctctcttaacgatgaagtggctcacgctttccctcgtcattatatcttgaaagatggtgatttgctcaaagttgatatggttttgggaggtcccattgctaaatctgacctaaatgtctcaaaattaaacttcaacaatgttgaacaaatgaaaaaatacactcagagctattctggtggtttagcagactcatgttgggcttatgctgttggtacaccgtccgaagaagtcaaaaacttgatggatgtaaccaaagaagctatgtacaagggtattgagcaagctgttgttggaaatcgtatcggtgatatcggtgcggctattcaagaatacgctgaaagtcgtggttacggtgtagtgcgtgatttggttggtcatggtgttggcccaactatgcacgaagaaccaatggttcctaactatggtattgcaggtcgtggactccgtcttcgtgaaggaatggtcttaaccattgaaccaatgatcaatacaggcgattgggaaattgatacagatatgaaaactggttgggcgcataagaccattgacggtggattgtcatgtcagtatgaacaccaatttgtcattacgaaagatggacctgttatcttgactagccaaggtgaagaaggaacttattaataaaaagtgaaaagactactggaagtttattttgataaaaaatccagtagatcttttcataataaaacgcattgtatcaagtgttaggggctgatatcatgcgtttttctgcttttaagattttttccaactctgtttgtaagcgcatcataacaaagggtctaggattcagggctctcctcctatatactattagtaaagtaaaactaagggaggatattttagtgtcgcagtctattgttcctgtagagattccacaatattgtcgttttgattctaaaaagagaaatggaattctgtttaatgttcgtattgccaatcttaaatttacttttttatattatacttcctgcgaaacaaaatatggtatagtagttctatgaatgatgaagcaagtaaacaactaactgatgcacgatttaagcgtcttgttggtgttcagcgtaccacttttgaagagatgttagctgtattaaaaacagcttatcaacttaaacacgcaaaaggtggacgaaaacctaaattaagcctagaagaccttcttatgcccactcttcaatagtgcgagaatatcgaacttatgaagaaattgcggctgattttggtattcacgaaagcaactttatccgtcggagccaatgggttgaaataactcttgttcaaagtggttttacggtttcaagaactcctctcagttctgaggacacggtaatgattgatgcgacggaagtaaaaatcaatcgccctaaaaaaacaattagcgaatgattctggtaaaaagaaatttcacgctatgaaggctcaagcgattgtcacaagtcaagggagaattgtttctttggatatcgctgtgaactatagtcatgatatgaagttgttcaaaatgagtcgtagaaatatcgaacaagctggtaaaatcttggctgacagtggttatcaagggctcatgaagatatatcctcaagcacaaactccacgtaaatccagcaaactcaagccgctaacagctgaagataaagcctataaccatgcgctatctaaggaaagaagcaaggttgagaacatctttgccaaagtaaaaacgtttaaaatattttcaacaacctatcgaaatcatcgtaaacgcttcggattacgaatgaatttgagtgctggtattatcaatcatgaactaggattctagttttgcaggaagtctattgaggtattgagctagtttatgaaaaaattgggtgaaaagtcgagtgttttagaaacccacagtgtagtattctagtttcaatccactatattttgctactccccgtaaagtttctattttccctgatttctgatataatagaaatattgacttcaagagtaaggaagagaagatgaacgcattattaaatggaatgaatgaccgtcaggctgaggcggtgcaaacgacagaaggtcccttgctaatcatggcaggggctggttctggaaagactcgtgttttgacccaccgtatcgcttatttgattgatgaaaagctggtcaatccttggaatatcttggccattacctttaccaacaaggctgcgcgtgagatgaaagagcgtgcttatagcctcaatccagcgactcaggactgtctgattgcgaccttccactccatgtgtgtgcgtattttgcgtcgcgatgcggaccatattggctacaatcgtaattttacaattgtggatcctggtgaacagcgaacgctcatgaaacgtattctcaaacagttgaacttggaccctaaaaaatggaatgaacgaactattttggggaccatttccaatgctaagaatgatttgattgatgatgttgcttatgctgcccaagctggcgatatgtatacgcaaattgtggcccagtgttatacagcctatcaaaaagaacttcgtcagtctgaatccgttgactttgatgatttgattatgctgaccttgcgtctctttgatcaaaatcctgatgttttgacctactaccagcaaaaattccaatacatccacgttgatgagtaccaagataccaaccacgctcagtaccaattggtcaaactcttggcttcccgttttaaaaatatctgtgtggttggggatgcggaccagtctatctacggttggcgtggtgctgatatgcagaatatcttggactttgaaaaggattaccccaaagccaaggttgttttgttggaggaaaattaccgctcaaccaaaaccattctccaagcggccaacgaggttattaaaaataataaaaatcgccgtcctaaaaatctctggactcaaaacgctgatggggagcaaatcgtttactatcgtgccgatgatgagctggatgaggctgtatttgtagccagaaccatcgatgaacttagtcgcagtcaaaacttccttcataaggattttgcagttctctatcggactaatgcccagtcccgtacaattgaggaagccctgctcaagtctaacattccttataccatggttggcggaaccaaattctacagccgtaaggaaattcgcgatattattgcttatctcaaccttattgctaatttgagtgacaatattagttttgagcgtattatcaacgagcctaaacgtggaattggtctaggtacagttgagaaaatccgtgattttgcaaatttgcaaaatatgtctatgctggatgcttctgctaatattatgttgtctggtatcaagggtaaggcagcccaatctatctgggattttgccaatatgatgcttgatttgcgggagcagctagaccacttaagcattacagagttggttgagtccgtcctagaaaaaacaggttatgtcgatattcttaactcccaagcgactctagaaagcaaggcacgggttgaaaatatcgaagagtttctttctgttacgaagaactttgatgacaccacggatgtgacagaagaggaaactggtctggacaaactgagtcgtttcttaaatgacttggctttgattgccgacacagattcaggtagtcaggagacatcagaagtgaccttgatgaccctgcatgctgccaaaggtctcgaatttccagttgtctttttgattgggatggaagaaaatgtctttccacttagtcgtgcgactgaagattcagatgaattagaagaagagcgccgtctagcctatgtaggtatcacgcgtgcagagaaaattctctatctgaccaatgccaactcacgcttgctttttggtcgtaccaattataaccgtccgactcgttttattaacgaaatcagttcagacttgcttgagtatcaaggtctggctcgtcctgcaaatacaagctttaaggcatcatatagcagtggtagtatttcctttggtcaaggtatgagtttggctcaggctcttcaagaccgtaaacgcggtgctgccccaaaatcaatccagtcaagcggtcttccatttggtcaatttacagctggcgcaaaaccagcatctagcgaggcaaattggtccattggtgatattgctctccacaagaaatggggagagggaaccgttctggaagtttcaggtagcggtgctaggcaggaattgaaaatcaatttcccagaagtaggtttgaaaaaacttttagccagtgtggctccaattgagaaaaaaatctaattttccatccttctcacgaataataaagtgaggaggatttttatgtacagtatttcattccaagaagattcactattaccaagagaaaggctggccaaggaaggagttgaagcgcttagtaaccaagagttgctagctattttactcaggacaggaacacgtcaagctagcgtttttgaaattgcccaaaaagtcttgaacaatctttcaagcctaacggatttgaaaaaaatgaccctgcaggaattgcagagtttgtctggtattgggcgtgttaaggccatagaattacaagctatgattgaactggggcatcgtattcacaaacacgagactcttgaaatggaaagtattctcagcagtcaaaagttggccaagaagatgcagcaggaattaggggataaaaaacaagagcacctggtggcactctatctcaatactcaaaatcaaatcatccatcagcagaccatttttatcgggtctgtaactcgtagtatcgctgaaccgcgagagattcttcactatgcaatcaagcatatggcgacttctcttatcttggtccacaatcatccttcaggagcggtagcgcctagccaaaatgatgatcatgtcactaaacttgttaaagaagcctgcgaattgatggggattgttctcttggaccatttgattgtctctcattctaattactttagttatcgtgaaaagacagatttaatctaaagttcattaacgacatagtcaaagagttttttatctttgggacgattttcaaaaagaagttctggatgccattggacaccgagaaaggcgacatcatccgtactcatgacagcctcaatgataccatctttaggatcatgagccacaacttttaaatttggtgctaagtccttgatgctctggtggtggaaggagttgatatgagagatttctccatagatttcttggagaacggtatctggttctgttaccaagcgttgagttgtgtactcaacagaagaatcctgccaatggtcttcgatatcttggtacaaagttccacccatggcaacgttaaagagttgggtaccacggcagacagagaaaatgggctttttctgtttaatagcttccttgatgagggccagttcgaagatatctctttgaaggtgatagtcatcactatcaatggttttgggttcgccataaaattttggatcgacattttgcccacctgtcaagatgagcttgtcaatcaaactgatatagtggcaggccatttcttgatcaccaatcggtaggatgatgggaatccctccagcatctttaacgccttcaacaaagccttttgctgcgtagctcatcatgatgtcatcatctggatgagttttttcgtttcctgtaatcccaataactggttttttcataaaatgattttcgctttctaatcctcttttcgcatgaagtagaggagggtttggagttcacttgtcaaatcgacatactgaacgaccacgtcttttggtaaatgcagatggactggtgaaaaactgagaattcctttcacaccagcatcaaccaagagattagcaacctcttgtgacttgacgctgggaacagttaggatagcagtcttcacatcagcatccttgattttatccttgatctgagaaatcccgtaaatgggaatcccgtcaggagtttgggtaccgacttcaggatggtcgtctaggtcaaaggccatgataatcttcatcttgttacgttcgtggaagcggtagtggagaagggcatggcccatatttccaataccaaccagcatgacattggtaatagagttgtcattgagcaaatcggcaaaaaatgtcattagttttttgacatcatagccaaaaccacgacgaccaagttcaccaaaataggaaaaatcacgacgtacggtcgctgaatcaataccgatagcctctgcaatttgcttagagttggcacgttcaatcttttctgcatgaaatctcttaaaaattcgatagtagagagagagtctttttgctgtagcttttggaatagcaaactgtttatctttcacaaaatcacaacctttctattcttctattttatagaaacattgtgaaaaaatcaacaaaaataagaaaaaactaagaaaaatcttagttttgatgtaaaaaatctgcatgagatagaaaacggtagaggtctccgaccagcccctgataaacttttttgcccctaaaagtcagagaagtcacataaagtgtatctggtaaggttacacatcctgacaaagtcaacatgagagcctcatgatcctcatacttgagagtacgctctacatgatagcagtccttataggtcagttcaaacattttggctctatctttccgattttgtaaagacaccacgttctaccaagctatccatgaggaagtagaatttttcctgatgaatatggtggtcttctgatttgaaaatatcaactagacgaaggccaaacttgtcagtgatattgattttagcccctgtaagttccttgttaatgatgattttgagttggaagccttcaccgctgtttggcactttttccaaaaggcgagtcagttcatagttaccaaccttagtttcaaaaaaggtgttatctttgagggtgaattttttaacagaagggctaagagtgtaatcgtaacgacaattttttaactgaatgattttttcaaatgccatatggctaacctccgataatttcttttaaggtttttgcgagggtttgtaggtcttcaacggtattttgtggcgacaaactgatgcgaagggattccttcaagcgttctgaatttgcgccatacatggcttcaagaacatggctggattggacaacgcctgcagtacaggctgagccagtagagattgaaattccagctaaatctagccgaaggagtaagaggtcatttttctgaccaggaaatccaatattgagaacataagggagatgatgttttcctctattcaggtaatactgaatgccctccagctctgccagaaaggcagtttctagattttgtacatgttgaaaatgttcttcttgtttttctaggtcttcttttagggctgcaaccatgcctacaatggcaggcagattttcagttcctgcacgttttttctgttcctggtctccgccatgtagataggaatcaaagtccatgctagatgcgtagagaaaaccgattcccttaggaccatggaatttgtgggcagaagcagtgagaaaatcaatgcccaattcttctgaatgaattgggattttaccaatagcctgaactgcatcaacatgataggcagcagggtgttgcttgagtatttggccaatttcagcgatgggcagtaggtttcctgtctcattattgacaaacatggtagaaaccaaaatcgtatcgtcacgtaaagccttttgaatttgctgggctgtgatttcttgattttctggctggataatggttgcttcaaacccaaagtgttgaaccaagtaatcaattgtttcaaggacagcatggtgctcgatggcagttgtgatgatatgttttccttgttcttggtgacgaagacagtagccaatgatggtagtattattgccttcagtcccaccagaagtgaaaaagatatgttgaggttttgtccttagtaactgggctagttcctgacgggcttctcgcaagagtttgccagcttgacgaccatgaccatgaatactagaaggatttccgtgggtttcttgcataaccttggtcatagctgaaatagcaactgctgacataggagtcgttgcagcattgtccaaataaatcaaagaatcaccttatttctttttattgtaggcaaagagtgggctgactggttttctttcgtgaatacggacgatagcatcaccaattaactcactagcagtgatgtagcatacatttttaggagttttttcttttgttgctactgaatcagtcacaagaatttctttaatattagtattgtcaagaagctcagcagctccctcgacgaagagaccgtggctagaaacagcataaatttctgtagctccttcacgttcaacgattttagaagcttcagagaaggtacgtcctgtatttaaaatatcatcaatcaagatagctttcttaccttcaacatcaccaataatataaccttcgttacgagttgcatcgtcttgagggtagtcgataatggcgataggagcatcaagatattcagccaggctacgcgcacgtttgacacctgaatttttagggctaacgacaacaacatctgaaccaagcaatcctttatcgcagtaatgttttgcgaataggggaacagtgaaaagattatccactggaatatcaaagaaaccttgaacctgaacggcatgcaaatcaagagtcaggatacgatcaactccagccttaaccagcatattggcaactagttttgctgtaagtggctcacgaggacaagcaatgcggtcttgacgtgcatagccaaaatatggaaggacaacgttgatactgtgggcacttgcacgcacacaagcatcgaccatgattaacaattccattaggtggttgttgacagggaaacttgttgattggatgatgtaaacatcataaccacggacactttcttcgatatttacttggatttctccgtctgaaaattgacgtgatgatagttttccaagtgggacaccaacagcttgggcaattttttgtgcaatctcttggttagagttgagtgcgaaaagtttcatgttttttctatctgacattatagaccgtcctctgtaaactttataaatcctagttatatttaccttacatatatgaactgggatttgtgtatttttatcttttctattttaccaaaaaatggagattatttcagctatttttcatacttttgacaaatcgaaccaattttgaaggagctttttgataggaaatctgatttttctctaaaaattgtcgaaaatcctgtttgccttgctcatgattttccacttcaagctccaattcgtaatctgttatatcaaagtatcggctctgatccagtgccatgagaccaatagctgttttcatttcatagcgaagcgttgttagacaaccaagaacctgccagttcttactttggataccatgtttcgccaattcatccagtactagcccttgaggaagttcttccttactcagatagttctcagcatcttttagttgcaatttttggttgtattccatgtttccaacactctgcgggactttgagtgtcaactcagcccagtcttcaaaggttcgaatgcgcatagcgactttcttttctcgcagttcaaaatcaggcgtgtcgatgtagtaatttgtttgaagaacaggagtgacacctgtgaactggtcttttagacgattgtattcatcttttttcaatagtgttttcaattcaatttctaaatgtttcatttttcttacctttttttatcgttgaaagcggatttatggtataataagcattgtatttattgtatatgaatctggagaaaaaatcaaagatatttttgacggataatatgagaacaagggagaatatatgaccttagaatgggaagaatttctagatccttacattcaagctgttggtgagttaaagattaaacttcgtggtattcgtaagcaatatcgtaagcaaaataagcattctccaattgagtttgtgaccggtcgagtcaagccaattgagagcatcaaagaaaaaatggctcgtcgtggcattacttatgcgaccttggaacacgatttgcaggatattgctggcttacgtgtgatggttcagtttgtagatgacgtcaaggaagtagtggatattttgcacaagcgtcaggatatgcgaatcatacaggagcgagattacattactcatagaaaagcatcaggctatcgttcctatcatgtggtagtagaatatacggttgataccatcaatggagctaagactattttggcagaaattcaaattcgtactttggccatgaatttctgggcaacgatagaacattctctcaactacaagtaccaaggggatttcccagatgagattaagaagcgactggaaattacagctagaatcgcccatcagttggatgaagaaatgggtgaaattcgtgatgatatccaagaagcccaggcactttttgatcctttgagtagaaaattaaatgacggtgtaggaaacagtgacgatacagatgaagaatacaggtaaacgaattgatctgatagccaatagaaaaccgcagagtcaaagggttttgtatgaattgcgagatcgtttgaagagaaatcagtttatactcaatgataccaatccggatattgtcatttccattggcggggatggtatgctcttgtcggcctttcataagtacgaaaatcagcttgacaaggtccgctttatcggtcttcatactggacatttgggcttctatacagattatcgtgattttgagttggacaagctagtgactaatttgcagctagatactggggcaagggtttcttaccctgttctgaatgtgaaggtctttcttgaaaatggtgaagttaagattttcagagcactcaacgaagccagcatccgcaggtctgatcgaaccatggtggcagatattgtaataaatggtgttccctttgaacgttttcgtggagacgggctaacagtttcgacaccgactggtagtactgcctataacaagtctcttggcggtgctgttttacaccctaccattgaagctttgcaattaacggaaattgccagccttaataatcgtgtctatcgaacactgggctcttccattattgtgcctaagaaggataagattgaacttattccaacaagaaacgattatcatactatttcggttgacaatagcgtttattctttccgtaatattgagcgtattgagtatcaaatcgaccatcataagattcactttgtcgcgactcctagccataccagtttctggaaccgtgttaaggacgcctttatcggcgaggtggatgaatgaggtttgaatttatcgcagatgaacatgtcaaggttaagaccttcttaaaaaagcacgaggtttctaagggattgctggccaagattaagtttcgaggtggagctattctggtcaataatcaaccgcaaaatgcaacgtatctattggacgttggagactacgttaccattgacattcccgctgagaaaggctttgaaaccttggaggctattgagcttccattagatattctctatgaggatgaccactttctagtcttgaataaaccctatggagtggcttctattcctagtgtcaatcactctaataccattgccaattttatcaagggttactatgtcaagcaaaattatgaaaatcagcaggttcacattgttaccagactagatagggatacttctggcttgatgctctttgccaagcacggttatgcccatgcacgattagacaagcagttgcagaagaaatctatcgagaaacgctactttgctttggttaagggagatggacatttggagccagaaggggaaattattgctccgattgcgcgtgatgaagattccattattaccagacgagtggctaaaggcggaaagtatgcccatacttcatacaagattgtagcttcttatggaaatattcacttggtctatattcacctgcacactggtcgaacccatcaaatccgagtccatttttctcatatcggttttcctttgctgggagatgatttgtatggtggtagtctggaagatggtattcaacgtcaggctctgcattgccattacctatccttttatcatccatttttagagcaagacttgcagttagaaagtcccttgccggatgattttagtaaccttattacccagttatcaactaatactctataaaaactgtctcagagtataattattatcttaaaggagaaaactcatggaagtttttgaaagtctcaaagccaaccttgttggtaaaaatgctcgtatcgttctccctgaaggggaagagcctcgtattcttcaagcaacaaaacgcttagtaaaagaaacagaagtgattcctgttttgcttggaaatcctgaaaaaattaaaatttatcttgaaattgaaggaatcatggatggttatgaggtcatcgaccctcaacattatcctcaatttgaagaaatggtttctgccttggtggagcgtcgcaagggcaaaatgactgaagaagatgtacgcaaggttttggttgaagatgtcaactactttggtgtgatgttggtttacttgggcttggttgatggaatggtgtcaggagcgattcactcaacagcttcaacagttcgcccagctctacaaatcatcaaaactcgtccaaatgtaactcgtacttcaggagccttcctcatggttcgtggtacggaacgttacctatttggagactgtgccattaacatcaatccagatgcagaagccttggctgaaattgccatcaactcagcaatcacagctaagatgtttggcatcgaacctaaaattgccatgttgagctattctactaaaggttcagggtttggtgaaagcgttgataaggtcgttgaagcaactaaaattgctcacgacttgcgtcctgaccttgaaatcgatggtgagttgcaatttgatgcagcctttgttcctgaaactgcagctctgaaagctcctggaagtacggtagctggtcaagcaaatgtcttcatcttcccaggtatcgaggcaggaaatattggttacaagatggctgaacgcctgggtggctttgcggctgtaggacctgttttgcaaggtttaaacaagccagttaatgatctttctcgtggatgtaatgcagatgatgtttacaagttgaccctcatcacagcagctcaagcagttcatcaatagtgaaaactataaagtgatatactatgctatactgtagttatgaaactatgtacgaaaagcactgccattaattcctgagaactaaattactgattggtgtcaaaaaggaaaacttccaagcgatgatatcctgtctatacacgacctatagaaatctgtaatatacatatccgtaaaacgataaattccctttttgattttaaatgagtatgaaaagagaattttttggctctttgtcaactgtagtgggttgaagaaaagctaagctcgagaaaggacaaatttcatcctttcttttttgatattcagagcgataaaaatccgttttttgaagttttcaaagttccgaaaaccaaaggcattgcgcttgataagtttgatgagattattggtcgcttccagtttggcgttagaatagtgtagttgaagggcgttgataatcttttctttatctttgaggaaggttttaaagacagtctgaaaaataggatgaacctgcttaagattgtcctcaataagtccgaaaaatttctctggttccttattctggaagtgaaaaagcaagagttgatagagctgatagtggtgtttcaagtcttccgaatagctcaaaagcttgtttaaaatctctttattggttaagtgcatacgaaaaataggacgataaaatcgcttatcactcagtttacggctatcctgttgaatgagtttccagtagcgcttgatagccttgtattcatgggattttcgatgaaactgattcatgatttggacacgcacacgactcatagcacggctaagatgttgtacaatgtgaaagcgatcaagaacgattttagcattcgggagtgaaacagcctgggagactgtttcagcctgagcctagaaatttgaaagcgaagctgtttagccaagtcatagtaagggctaaacatatccatagtaatgattttgacgcgacatcggacggctctatcatatttaagaaagtgatctcggatgacagcttgtgttctaccttcaagaacagtgatgatattgagattgttaaaatcttgcgcaataaagctcatctccatctcccgattgaaacagtcactccccggactgtttcaacgtcccaagacataatcttaggcagatttctaaaattacactcaaagtggaagtcattgagctttcgaatgacagttgaagttgagatggaaagctgatgggcaatatcagtcatagaaatcttttcaattaacttttgagcaatcttttggttgatgatacgagggatttgatgattcttcttgacgatagaagtttcagcaaccataattttagaacaatgatagcacttgaaacgacgctttctaaggagaattctagtaggcataccagttgtttcaagataaggaattttagaaggtttttgaaagtcatatttcttcatttgacttccgcactcaggacaagatggagcttcatagtccagtttggcgatgatttccttgtgtgtatccttattgacgatgtctaaaatctggatattagggtctttaatgtctagtaattttgtgataaaatgtaattgttccatatgattctttctaatgagttgttttgtcgcttttcattataggtcatatgggacttttttctacacaaaaataggctccataatatccataggggatttacccactacaaatattatagagtcatttttgcacctttcttagcctttgttatcgacaagcattgttctagctccttgtttttagaaaggtaatttcccagcgaaagcacccagttttttcttggtagtttcatcgatttgttcaagagcagagttgatggcttgaacggtcatatcagaaagagtctcaaggtcctctgggtcaacgacagctggattgaaatcaatgctgacaactttcttatcgccagttaaggtcgcttggacaagatcttgagcagatttgccaacaaattgcatagcagcaagttcagcttggctttgttccatttgtttttgaagtttttgtgcttgacgcatcatgttttgcatgttcatcataagatttctaaagttcctttcatctcaaggggataatccttgttgttaacaagtgcctgattttctctcctaattgttattagtagcatagccatcaagcccaagtattgattttattataccatttttttaagacatagtcttttattggtgagagttatttatgtcaaggagtgattagaaataaattaaaataatgatttttgctaagagggctctattctagtttcatggaaatgattttactaaaggttcgtatgctttgtttgcaaacatgttacatctatctatttttggataaatagttgtctattattatttttatgctaatagtaaaatctaaatggtagcctacgattttttagaaagaaaatggtacaatatttctaagagaaaatacaatgggaggtaaaatgaggttattacctataagaaaaatatcacgtcagtctaaaaggttagcactttttttgacgttttgtgctggatatgtggatgcttacacttttattgttcgcgggaatacccttgtagctggacaaactggaaatgttgtctttctttcagtagaattaattaaaaataatgtttcggatgttagggacaaggttctcaccttgctagcgtttatgatgggagtctttttattaacgatttataaggaaaaattgagaattgtgaaaaaacctattctgtccttgattcccttggcaatcttatcaatcattattgcttttgtgccgcaaactgtggataatatctatctagtgccgcccttggccttctgtatgggactggtgacaactgcttttggagaagtgtcgggtattgcctataataacgcttttatgacagggaatatcaaacggaccatgctggcttttggagattatttccgaaccaagcacactccttttttgcgtgaaggattcatatttgttagcctgcttagtagttttgtccttggcgttgtcttttcagcctatttgacgattttctatcatgaaaagaccattcttggtgttcctattatgatgagcgttttttacctcagcatgctttttgcctcttggcagaaaaaagtaaaagaaaaagcttcattttaggtgttattacttgtaagaaaataggagatatgctatacttgaagagttgactatgcacgatcctgtgcaaccgcacgaacatcgttgcttgattattcaagtttaagtggttcgtcccacgatgctaggcgagtcttcacaaaaaatcggggaaacccataaaaatcataggaggtgcataatgagcacatacgcaattatcaaaactggcggaaaacaagttaaagttgaagttggtcaagcagtttacgttgaaaaattgaacgttgaagctggtcaagaagttacttttaacgaagttgttcttgttggtggtgaaaacactgttgtcggaactccacttgttgctggagctactgtagttggaactgttgaaaaacaaggaaaacaaaagaaagtggttacttacaagtacaaacctaaaaaaggtagccaccgtaaacaaggtcaccgtcaaccatatacaaaagttgtcatcaacgcaatcaacgcttaattttaaggagaacacatgatacaggcagtctttgagagagccgaagatggcgagctgaggagtgcggaaattactggacacgccgagagtggcgaatacggcttagatgtcgtgtgtgcatcggtttctacgcttgccattaactttatcaattctattgagaaatttgcaggctatgaaccaatcctagaattaaacgaagatgaaggtggctatctgatggttgaaataccaaaagatcttccttcacaccagagagaaatgacccagttattctttgaatcatttttcttaggtatggcaaacttatcggagaactattctgagttcgtccaaaccagagttatcacagaaaactaacacggaggaaaacattatgttaaaaatgactcttaacaacttgcaacttttcgcccacaaaaaaggtggaggttctacatcaaacggacgtgattcacaagcaaaacgtcttggagctaaagcagctgacggacaaactgtaacaggtggatcaatcctttaccgtcaacgtggtacacacatctatccaggtgtaaacgttggtcgtggtggagatgatactttgttcgctaaagttgaaggcgtagtacgctttgaacgtaaaggacgcgataaaaaacaagtttctgtttacccaatcgctaaataaaaaggtccattgaaccttttatcccgaaccttgaaatgtaaaggtgaggaagctagaaacagcttaaaataaggctttccgagttttcggagagcctgtttttttgttttggtacccatactttttaatatgtatagtggattgatactcttcgaaaatcaaattcaaaccatgtcaatttcaccttgccgtactcaagtacagcctgcggctaacttcctagtttgcactttaattttcattgagtatgaatctggaatagaacactgttaaacattgatatgagtttcctactcgatttcttcagattttatttcaattgactataagaactgctatctggtttcaaatattggcttgtcgtcccttcacttgtctgaatggcttgagccgttccttctgataagggaaaagatattctttagctgaaacggtctgagaatccaagctaacagatggagagaaaaatagcccagtctgaagcacactagatgggagttgttggaaagcagtcatctagtttttctttgctgttttggcttttttctttgtcattagggaaagtgacttgcttcaaatcagggagtttaggaaattcttcaaacatcttgcccaagttgtctcattttgtaaattttacagccataggtgtacctcgattctaaattctaccttttcggcaccaattagtaatttaaagttctcaggagttagttgcattgctttttcatacataagcatagtatgacactttatggttaccgaacaagtctaatcactccttgcaaaattttgaagatgtcctacaagtttttgagaagaatattgcaaagttcatagttaagcaacgatagaataaagtgctttttgaaaacaggtacacttcatgtgaaaaaaacaacatttcagattttctgttccagaaatagctatcgctatgatataattattttatgattattactattcctataaaaaaccaaaaagatattggcacaccatctgattcagtcgttgttctcggctattttgatggcatacataaggggcatcaagaattatttcgtgttgccaacaaggctgcgagaaaggatttgttgcctatcgtcgttatgacctttaatgaatctccaaagatcgctttagagccttatcatccagatttgtttttgcatattttgaaccctgctgaacgtgaaagaaaattaaagcgcgaaggtgtagaagaattatatctccttgattttagtagtcaattcgctagtctcactgcacaagaattctttgcaacttatatcaaggctatgaatgccaaaattattgttgcaggttttgattatacatttggttctgacaaaaaaacagcagaagatttaaagaattactttgatggagaagttatcattgttccacctgtagaagatgagaaaggaaagattagttcaactcgtatccgtcaagctattttagatggaaatgtgaaagaagcaggaaaacttttgggggcaccgcttccatcaagaggtatggtggttcatggtaatgctcgtggtcgtacaattggttatccgacagcgaatttagtgcttttagaccgtacttatatgccagcagatggcgtttatgttgttgatgttgagattcaaagacagaagtatcgtgctatggctagtgtcgggaaaaatgtgacctttgatggagaagaagcacgttttgaagtcaatatttttgattttaatcaagatatttatggggaaaccgtcatggtttattggcttgatcgcattcgagatatgaccaaatttgactcagttgaccaattagtggatcagttaaaggctgatgaagaagtaactcggaattggtcttaagagcttgagtaaataaaataaaaaagaggttgtctgtaacccaaaagatagatgatttagtctaacttttgaggtcacgacattacctctttttattctttttcaaaggtgaagccttctcctaggatttcatgggcttctgtaatagttataaaggcttgaggatcgattcgatgaatcatttccttcgttttcacaatttcatttcttccgacaatacagtagatgattttcaaattttctttactatagtagccttgaccagaaataaaagtaacacctcttccgaggtcatcattaatcgccttagcaagttggtcaggacgttttgtgataatcataaagcctttgccggcatatcctccttcaccaatcaaatcaataacacgagaaacaataaaatcaaacaaaagcgtgtaggaaaccaatctcaaatccttgaagattaggagaatcaacatgagaatacaaaaatctaagataaagagcagttttcctatggatatatgagtgtatttgttgagaatacgagctagaatatcagttccgccagttgtacctccagcattaaaaataattccaaggccaattcccaataggattcccgctataagggctgtgattagtaaatcaccttgaagatcaatatgaaggggaatatgctcaaaaaaagctaaccagccggacaaagctaaggttcctagtaaactagaatagagggatttggctccaaaaatcttccaagctaggatgaaaaggggaatattaatcagcaggttcatgagggaaacagggattttaaaaagataaaaggtgatgagggtaatgcctgtcgcccctccttcaaagagatgatggggaactacaaaataagtcagtccaaaagcataaatagcagcacctagtaaaatggtaaaaatggggtaaatttttttaatcataggacacctcttttcttataagttgattatatcaaattttacggaaaatttgattgactccattaggatttttaatcttttttttgatataattagaagtaaggaaaccaatctgaatcctaaaatagaaagattgatactatgacaaaaattaagattgtaaccgattcatctgttactattgaacctgaactagtaaagcaattagatattacaattgttccattatctgtaatgattgataatgttgtttattctgatgcggatttgaaagaagaaggtaaatttcttcagttgatgcaagaaagtaagaatcttccgaaaacaagtcagccacctgtaggtgtctttgctgagatttttgaagacctatgcaaagatggtggccagattcttgctattcatatgtcccatgctctttcgggtacggtagaagcagcacgccaaggtgctagcctatctactgcagatgtgactgttgttgatagttccttcactgaccaagccctgaaattccaagttgttgaggctgcgaagttagctcaagaaggtaaagatatggaggcaattttatctcatgtagaagaggttaaaaaccatacagagctttatattggtgtttcaactttggaaaatcttgtcaaaggtggacgaattagccgtgtaactggcttgttgagctctcttctcaatatccgtgctgtcatgcaaatgaaagaccatgaattgcagccaatggttaaaggtcgtggaactaaaacatttaaaaaatggttagatgagttgataacatcgctttctgaacgtgctgtagcagagattggaatttcatattctggtagtgatgattgggcaaaagagatgaaagaaagcttacaagcttatgttgaaaagccaatttctgttttggaaacgggttccattattcaaactcacacgggtgagaacgcttgggctattttgatacgttaccactcctaaaaaataaataaaatgggaagaaatagcgtttttaacttgacctaaaagggattttaggatatgattatatttgttaattagaaattatttggaggaatcattaacatggcaaacaaacaagatttgatcgctaaagtagcagaagctacagaattgactaagaaagactcagcagcagcagttgaagctgtatttgcagcagtagctgactatcttgcagctggtgaaaaagttcaattgatcggttttggtaactttgaagttcgtgagcgcgcagaacgtaaaggtcgcaacccacaaactggtaaagaaatgacaattgcagcttctaaagtaccagcattcaaagctggtaaagctcttaaagacgctgttaaataatcagtctttaaaaagcctattgtatcaagctttctagcttggtcagtaggttttttaattatgaaatctagtaataaatagagttaaaaagttgaatgttccgaaaatattgtatatagtagactgaatctaaaatagtacgaaacaattgctaaaacatttatagaaattaattttactttcccaatcgatttgttctcatcttatttcaatctgctatacgtacgtaaatgatgaaaagaattaaataatagacttgtgcgataactatttgaaacaagattagctggttagaaaatccaacaagatagtgaagtaatctaatataaaatatacataatttagtttattttatgttataaaagttgtactaaaagacttacgattatcttgaatgccttagggaaacatgctatactacttgtatgattattttacaagctaataaaattgaacgttcttttgcaggagaggttcttttcgataatatcaacctgcaggttgatgaacgagatcggattgctcttgttgggaaaaatggtgcaggtaagtctactcttttgaagattttagttggagaagaggagccaactagcggagaaatcaataagaaaaaagatatttctctgtcttacctagcccaagatagccgttttgagtctgaaaataccatctacgatgaaatgcttcatgtctttaatgatttgcgtcggacggagagacaactgcgtcagatggagctggagatgggtgaaaagtctggtgaggatttggataaactgatgtcagattatgaccgcttatctgagaattttcgccaagcaggtggctttacctatgaagctgatattcgagcgattttgaatggattcaagtttgacgagtctatgtggcagatgaaaattgctgagctttctggtggtcaaaatactcgtttggcacttgccaaaatgctccttgaaaagcccaatctcttggtcttggacgagccaactaaccacttggatattgaaaccatcgcctggctagagaattacttggtaaactatagcggtgccctcattatcgtcagccacgaccgttatttcttggacaaggttgcgacaattacgctagatttgaccaagcattccttggatcgctatgtggggaattactctcgttttgtcgaattgaaggagcaaaagctagttactgaggcaaaaaactatgaaaagcaacagaaggaaatcgctgctctggaagactttgtcaatcgcaatctagttcgtgcttcaacgactaaacgtgctcaatctcgccgtaaacaactggaaaaaatggaacgtttggacaagcctgaagctggcaagaaatcagccaacatgaccttccagtctgaaaaaacgtcgggcaatgttgttttgactgttgaaaatgcagctgttggctatgacggggaagtcttgtcacaaccgattaacctagatcttcgtaagatgaatgctgtcgctatcgttggtccaaatggtatcggcaagtcaacctttatcaagtctattgtggaccagattccttttatcaagggagaaaagcgctttggcgctaatgttgaggttggttactatgaccaaacccaaagcaagctgacaccaagtaatacggtgctggatgaactctggaatgatttcaaactgacaccagaagttgaaatccgcaaccgtcttggagccttccttttctcaggagatgatgttaaaaaatcagtcggcatgctatctggtggcgaaaaagctcgtttgcttttagctaaattgtctatggaaaacaataactttttgattctggatgagccgaccaaccacttggatattgatagtaaggaagtgctagaaaatgccttgattgactttgatggaaccttgctgtttgtcagtcatgatcgttactttatcaatcgtgtggcaactcatgttttggaattgtctgagaatggttcaactctctaccttggagattacgactactatgttgagaagaaagcaacagcagaaatgagtcagactgaggaagcttcaactagcaatcaagcaaaggaagcaagtccagtcaatgactatcaggcccagaaagaaagtcaaaaagaagttcgcaaactcatgcgacaaatcgaaagtctagaagctgaaattgaagagctagaaagtcaaagccaagccatttctgaacaaatgttggaaacaaacgatgccgacaaactcatggaattacaggctgagctggacaaaatcagccatcgtcaggaagaagctatgcttgagtgggaagaattatcagagcaggtgtaaagatggaacatcttggaaaagtatttcgtgaatttcgaacaagtggaaattattctttaaaggaagcagcaggcgaatcctgctctacctctcagttatctcgctttgagcttggggagtctgacctggcagtctcccgtttctttgagattttggataacattcatgtaacaatcgaaaatttcatggataaggcaaggaattttcataatcatgaacatgtgtctatgatggcacagattatcccactttactattcaaacgatattgcaggttttcaaaagcttcaaagagaacaacttgaaaagtctaagagttcgacgactcccctttattttgagctgaactggattttgctacaaggtctgatttgtcaaagagatgcgagttatgatatgaagcaggatgatttgggtaaggtagcagattatctcttcaaaacagaagaatggaccatgtatgagttgattcttttcggtaacctctatagtttctacgatgtagactatgtcactcggattggtagagaagttatggagagggaggaattttaccaagagattagtcgccataagagattagtgttgattttggccctcaattgttaccagcattgtttagagcattcttctttttataatgccaactattttgaggcttatacagagaagattattgacaaaggtattaagctttatgagcgtaatgttttccattatttaaaaggttttgccttatatcaaaaaggacagtgtaaagaaggctgtaagcagatgcaagaggccatgcatatttttgatgtgttaggtcttccagagcaagtagcctattatcaggaacactacgaaaaatttgtcaaaagttaattttcccaaataagggaaaaaataaaaagctcctttcggttttgatacaatagtttcaaaatttgagaggagctttaatatgaatcgctatgcagtgcagttgattagccgtggggctatcaataaaatgggaaatatgctctatgattatggaaatagtgtctggttggcttctatggggactataggacagacagttttaggaatgtatcagatttctgagctcgtcacatctattctcgtcaatccctttggcggagttatttcagaccgtttttctcgtcgtaagattttaatgacggcagatcttgtttgtgggattctttgtctggctatttctttcataaggaatgatagctggatgattggcgctttgattgttgctaacattgtgcaggctattgcttttgccttttctcgcacagccaataaagctatcataactgaagtggtggagaaagatgagattgtgatctataattctcgcttagagctggttttgcaggttgtaggtgttagctctcctgttctttccttccttgttttacagtttgcaagtctccatatgacgctactgctagactcgctgacttttttcattgcttttgttctagtggctttccttccaaaagaggaagcaaaagttcaagagaaaaaggcttttactgggagagatatttttgtagatatcaaggatgggttacactatatctggcatcagcaagaaattttcttccttttgctggtagcttccagcgttaatttcttttttgcagcttttgaatttctacttcccttttcgaatcagctttacgggtcagaaggagcctatgcaagtattttaactatgggggctattggttccatcattggggctcttctagctagtaaaattaaagctaatatttataatcttttgattttactggctttgacaggtgtcggagtttttatgatgggattaccacttccaacttttctttccttttctggaaatttagtttgtgaattgtttatgacgatttttaatattcacttttttactcaagtacaaaccaaggttgagagcgaatttcttggaagagtactgagtacaatttttaccttagctattctatttatgcctattgcaaaaggatttatgacagtcttgccaagtgtccatctttattctttcttgattattggacttggagttgtagccttatatttcttagctctcggatatgttcgaactcattttgaaaaattgatataaggttgcttgagtttcaaaaataatttcaaactaagtgttttttccgcccttctcgtttgtgaggagggcttgttttatggtaaaatggtcttatgaataaaagaatgaatgagttagtcgctttgctcaatcgctatgcgactgagtactataccagcgataatccctcggtttcagacagtgagtatgaccgcctttaccgtgagttggtcgagttagaaactgcttatccagagcaagtgctagcagacagtccgactcatcgtgttggtggcaaggttttagatggttttgaaaaatacagtcatcagtatcctctttatagtttgcaggatgctttttcatgtgaggagctagatgcttttgatgcgcgtgttcgtaaggaagtggctcatccgacctatatttgtgagctgaaaatcgatggcttatctatctcgctgacttatgaaaaggggattttggttgctggggtaacacgtggagatggttcaattggtgaaaatatcacagaaaacctcaagcgtgttaaggacatccctttgactttgccagaagaactagatatcacagttcgtggggaatgttacatgccacgcgcttcctttgaccaagttaaccaagcgcgccaagaaaatggagagcctgaatttgctaatcctcgtaatgcggcagcaggaactctgcgtcagttggatacagcagtagttgccaagcgtaatcttgcaacgtttctctatcaagaagccagcccttcaactcgtgatagccaagaaaagggtttgaagtacctagaacaactaggttttgtggtcaatcctaagcgaatcttggctgaaaacatagatgaaatctggaattttatccaagaagtaggacaggaacgggaaaatctgccttacgatattgatggagtggtaatcaaggtcaacgacctagcaagtcaagaagaacttggttttacagttaaggctccaaagtgggcagtagcctacaagttccctgccgaagaaaaagaagctcaactcttatcagttgactggacagttggccgtaccggtgttgtaactccaactgctaatctaacaccagtacaacttgccggtacgactgttagccgtgcgaccctgcacaatgtagattatattgctgaaaaagatatccgaaaagacgatacggtcattgtatataaggctggtgacatcatccctgccgttttacgtgtggtagagtccaaacgggtttctgaagaaaaactagatatccctacaaactgtccaagttgtaactctgacttgttgcactttgaagatgaagtggccctacgttgtatcaatccgcgttgccctgctcaaatcatggaaggcttgattcactttgcttctcgtgatgctatgaatattacaggccttggtccatctattgttgagaagctttttgctgctaatttagtcaaggatgtggcggatatttatcgtttgcaagaagaggatttcctccttttagagggagttaaggaaaagtccgctgctaaactgtatcaggctatccaagcatcaaaggaaaattctgccgagaagctcttatttggtttgggaattcgtcatgtcggaagcaaggttagtcagcttttacttcaatatttccattcaattgaaaatctgtctcaggcagattcagaggaagtggctagtattgaaagtctaggtggcgtgattgccaaaagtcttcagacttattttgcgacagaaggctctgaaattctgctcagagaattgaaagaaactggggtcaatctggactataaaggacagacggtagtagcggatgcggccttgtcaggtttgaccgtggtattgacaggaaaattggaacgactcaagcgctcagaagctaaaagtaaactcgaaagtctgggtgccaaagtgacaggtagtatttctaaaaagaccgacctcgtcgtggtaggtgcagacgctggaagtaaactgcaaaaagcacaagaacttggtatccaggtcagagatgaggcatggctagaaagtttgtaatggatcgtttaaaaacagagtttagagaatatgactatgtctgttaattgagacgagattgacaaaaatttattagtgaaatagaaacaaagtaaaaaggaaaaataaaaaatgtataactaccctatgcgcattcattaccatcgtaagaatggagaatatgacacttgctcctttgtaaaaagtcaggatcaacgaattgatttgctaacctacaaagaagattattttggagctttatttagctttgaacacccaagttcacatgttatagaaagcttgaattttgtggttcatacaggtcaaactagtaaagaatattctatccgttttaatcactatcccctattaacagaggtctggattttggaaggcgatgataggatttattactctgaaaatcctgctattgccagtcctttctataaaaatcaaaatccttttgcctttgataaggccattaacagtgctagttttgatcatcattggggttaccaaggagaattgggttgccgtgtagaggacaatcaggctcatttttctctctggtcacctacagcgacagaagtgcaagttgtcgtttatgaatcagctgctaatgatgcacccgtttggaagacttttgagatgaaaagaggcaatagctactcttataatcataaggacaatacaatcggtgtctggagtttggatgttgaagaagatttggtaggtaagacttatcagtatcaagtccaattccctcatcaccaaacactgacacgtgatccttatacaatcgcgaccagccctgatggcaaacgttcagctattctgagccatgtagaaaagcaagttgaaaacttcgaggttaagcacggttcggaggctacttggcgcttggaaaatccatgtaaggcagttatctgtgaaatgcacattcgtgatttgactaaatcacctacatcgggtgtagatgaacatcttcgaggaactttcttgggtgctgctcaggctggaacagttaaccaatacggccagtcaactgcttttgattacatcaagaagctgggctacaattatgttcaattgcaaccaattgcagaccgtcataaagaatacgatgaggatggaaatgtaacctacaactggggttatgatccacaaaactataacgcgccagaaactagtttttcaactaatccagatgatccagctcaggtcattcgtgatttgaaggtgatggttcaagcttatcacgatgcgggtattggagtcattatggatgtagtctataaccataccttctcagttgttgatgcaccattccaaacaacagtccctgattactattatcgtatgaatccagatggtaccttccagaatggaacgggtgttggaaatgaaacagccagtgaacacgaaatgtttcgcaagtatatgattgattctcttctatactgggtgcaggaatataatattgacggcttccgttttgacttgatggggattcatgatgtcaagaccatgcagatgattcgtcaaagcttggatgaaatcgactccaacattatcctctatggagaaggatgggatatgggaacaggtcttgccccttatgataaggccaagaaggacaatgcctaccagatgccaaatattggtttctttaatgacaatcagcgcgatgctgtcaaagggggagaagtttatggtgctatcaagtcaggttttgtcagtggtgctgcgacagagccaattctagctaaagcaatcctaggaagtcgtgaattaggaagctatacacatccaaatcaggtgcttaactatgtagaagcccatgacaattacaatcttcacgatttattggcaacccttcatccagaccaaagttcagagcaaatcatgcgcaaggtcgaaactgccacagccatgaatctgctcatgcaggggatggcctttatggaaatcggtcaagaatttggtcgtaccaaactggttgcgactggtgaaaatggtgagttgacccatgatgatagagagcgtgcgatgaatagctataatgctcctgacagtgtgaaccaagtgaactggaacttgattaatgagcgtcaagacagtattgagtttatccgtcaagtcatccgattgaagacaaaaactggtgccttttcttactctagctatgatgaaatttaccatcatgtctttgtgcattctgcgattgaacatagcggctaccttatctatgaagttcacggcaaagaacacctcttggtggttgtgaatgctaaatcagaaccctatcaatttgaaaatgcaggaaatttagctatgttggtaaccaacagtcgctcaaaagaagataatgttttaaatgatattagtctagctgtcttgagtgttttataaataccatctatctcgctatttttacacagacaaattcccagttatgagtattagtaaaaaatccattcattgaaattgaaagaatagaaagaacctggctaacagctcacttgtatagaaaatttgataaatattttcacaaaacaagacctcctatcaaagtttttgaacacttgataggaggtctttttattatgaagacttttacctagactttgtttcagcaatctatgacagttatagtaggctgaaattggaatagcacacccttgtttctgaaacattgtgagaaattggtttggctgtccccaaccaaattgttcagtttttttattttactatagatgatactcattcacgctcttcgaaaatttcttcaaaccacattagcctcgccttgacgtagtggatttttttaatttttattgagtatactttgaaaaatcaagtttgtgaaaataatctcaaaaattttgcaaaaagggttgtgattttctgaaaatttggtaaaatatatcttaatcattttcaggaggacaaaaatttgacaagatatcagaatttagtaaatggaaaatggaaatcatctgaacaagaaattacgatttattcaccaatcaatcaagaagaattgggtacagttccagccatgactcagactgaagctgatgaggctatgcaagctgcgcgtgcagccctgccagcatggcgagctttatcagcagttgaacgtgcggcttatttgcataaaacagcagctattttagaacgcgataaggaagaaattggtactatccttgccaaagaagtagcaaaagggattaaagcagcaattggagaagtagtgcgtacagcagacttgattcgttatgctgctgaggaaggtctccgtatcactggacaagcaatggaaggtggtggttttgaggcaacaagtaaaaacaaactggctgttgtccgtcgtgaaccagttggtatcgtgctagcgattgctccctttaattatccagttaatttatctgcttctaaaattgcacctgccttgattgcagggaatgtggtcatgtttaagccaccaacacaaggttccatttctggactcttgttggctaaagcatttgaagaagcagggattccggcaggtgttttcaacaccattacaggtcgtggttcagaaattggggattatatcattgagcacaaagaagtcaacttcatcaactttacaggttcaactcctattggagaacgtattggtcgtttagctggtatgcgtcctatcatgttggaacttggtgggaaagatgcagctcttgtactagaagatgcagatttggaacatgctgccaagcaaattgttgcgggagcctttagctactcaggacaacgttgcacggccattaaacgtgtcattgttctcgaaagtgtagcagataaattagctactttgcttcaggaagaagtttctaaattaacagttggtgatccatttgacaatgctgatattacacctgttattgacaatgcttcagccgacttcatttggggcttgattgaggatgcacaagaaaaagaagctcaggctcttacaccaatcaaacgtgagggcaatcttctctggccagtgctttttgaccaagttacaaaagatatgaaagtggcatgggaagagccatttggtcctgttttaccaatcattcgtgtggctagtgtagaggaagctattgcctttgccaacgaatctgaattcggccttcaatcatcagtctttacaaatgatttcaaaaaagcctttgaaattgctgaaaaacttgaagtaggtacagtccacattaataataaaacccagcgtggtccagataatttcccattccttggtgtcaaaggttctggagctggagtgcaaggaattaaatatagcattgaagcgatgacaaatgtcaaatccattgtttttgatgtgaaataacgtgtaaaaccaggaaattgttttcctggttttatttttttgctataaaataataataattatagaaaaaatacgaactttttggtattataatagattgaaaccagaatagtacacctctacttctaaaacattgttagaaatcgatttgactgtcctgatcgatttgtcctgttattatttcattttactatatataatacattggagttaaaatagtacactttgatttctaagacattgttagaaattagattaaattccttaatcgatttgcgcatgttttatttcatttcactatagtagaaaaagaaaggcgttttcgcaattttttgaaaaaatattgatttacaattgaacgagtaagtgaacttgttgtagattttcaaaataattaaagaagtatagtaatttacttgaatcttctctaaaaaggtagtataataaaaacatagaaaacgcttacaggagaaggggagtatatggataatagagaagcattaaaaacctttatgacgggtgaaaatttttatctccaacattatctaggagcacatagggaagaactaaatggagagcatggctataccttccgtgtttgggcacctaatgctcaggctgttcacttggttggtgattttaccaactggattgaaaatcagattccaatggtaagaaatgattttggggtctgggaagtctttaccaatatggctcaagaagggcatatttacaaatatcatgtcacacgtcaaaatggtcatcaactgatgaagattgacccttttgctgtcaggtatgaggctcgtccaggaacaggggcaatcgtaacagagcttcctgagaagaaatggaaggatggactttggctggcacgaagaaaacgttggggctttgaagagcgtcctgtcaatatttatgaagttcacgctggatcatggaaaagaaattctgatggcagtccttatagttttgcccagctcaaggatgaactcattccttatctcgttgaaatgaactatactcatattgagtttatgcccttgatgtcccatcctttgggcttgagttgggggtatcagcttatgggttacttcgctttagagcatgcttatggccgaccagaggagtttcaagattttgtcgaggagtgtcatacccataatattggggttattgtggactgggtaccagtcactttaccatcaacgatgatgccttagcctattatgatgggacaccgacttttgaataccaagaccataataaggctcataaccatggttggggtgcccttaattttgaccttggaaaaaatgaagtccagtccttcttaatttcttgcattaagcattggattgatgtctatcatttggatggtattcgtgtggatgctgttagcaacatgctctatttggactatgatgatgctccatggacacctaataaagatggcggaaatctcaactatgaaggttattatttccttcagcgcttgaatgaggttattaagttagaatatccagatgtgatgatgattgcagaagaaagttcgtctgcgatcaagattacgggaatgaaagagattggtggtctaggatttgactacaaatggaacatgggctggatgaatgatatcctccgtttctacgaagaagatccgatctatcgtaaatatgactttaacctggtgactttcagctttatgtatgttttcaaggagaattatctcttgccattctcgcacgatgaagtggttcatggcaagaagagtatgatgcataagatgtggggagatcgttacaatcaattcgcaggcttgcgcaatctctatacgtaccaaatttgtcaccctggtaagaaattgctcttcatgggtagcgaatacggtcaattcctagaatggaaatctgaagaacagttggaatggtctaacctagaagacccaatgaatgctaagatgaagtatttcgcttctcagctaaaccagttttacaaagatcatcgctgtctgtgggaaattgataccagctatgatggtattgaaatcattgatgcggataatcgagaccagagtgttctttcctttattcgtaagggtaaaaagggagaaatgttagtctgtatctttaatatggtacctgttgagcggaaagattttacaatcggactacccgttgcaggaatttacgaagaagtatggaatactgagttggaagagtggggaggcgtttggaaagaacataatcaaactgttcaaacgcaagaaggactatggaaagattatgagcagaccttaacctttaccctaccggctatgggagcaagtgtatggaaaatcaaacgtcgcttgaaatctactaaaaccgtcacaaataaaaaccaaaaaggagtagaaaatgaaaaatgaaatgttagctttgattcttgctggtgggcaaggaactcgtctcggtaaactcactcaaagcatcgcaaaaccagctgtgcaatttggtgggcgctaccgtatcattgactttgccctatcaaactgtgccaactcagggattcacaatgttggggtcgttacacagtatcaaccacttgctctcaacaaccatattgggaatggttcaagctggggactagacggtattaattcaggtgtctctattcttcaaccttattctgcaagtgaaggaaatcgttggtttgaggggactagtcacgctatttaccaaaatatcgactatatcgacagtgtcaatcctgagtatgtcttgattttgtctggggatcacatctacaaaatggactatgatgatatgctccagtctcataaggataataatgccagcttgacagtagcagttttagacgtccctcttaaagaagcaagccgttttggtatcatgaacacagatgctaacaatcgtattgttgaatttgaagaaaaaccagctcaacctaaatctacaaaagcttctatgggaatctacatttttgattggcaacgccttcgtaatatgttagtcgctgctgaaaagagcaaggttggcatgtcagactttggtaaaaatgtcattccaaattaccttgagtcaggtgaaagtgtttatgcttacgaatttagtggttattggaaagatgttggtactattgagtcactttgggaagcgaacatggagtatatttctccagaaaatgccttggatagtcgtaaccgtcaatggaagatttactcaagaaacttgatttcaccaccaaacttcctcggggcaaatgctcatgtggaagactcattagttgtagacggatgtttcgttgatggaactgttaaacattctatcctttcaacaggcgcgcaagttcgcgaaggagcggaagtccttgattcagttatcatgagtggagctatcattggtcaaggagctaagattaaacgtgccattattggtgaaggtgcgattatttctgacggtgtcgaaattgatggaacagatgaagtacaagttgtaggatataatgaagtagtgggggtagcaacagatgaagattgataaatattctgccattttaggaaatacagttggttttcacaatatgtcgacattgacggaccaccgtccagtagcaagtttgccatttggtgggaaatatcgtttgattgacttcccactttcaagccttgctaatgcaggtgttcgtagtgtctttggtattttccagcaggataatatcagctcagtatttgaccatattcgttcaggacgcgagtggggcttatcaacccttcttagccattactatctaggaatttacaatacccgtgtagaaagtagtacagttggaaaagaatactaccaacagcttcttacttatttgaaacgttctggctcaaaccaaacggttgccctcaactgcgatgttcttattaacattgatttgaaccaagttttccacctacatagtacaacaaaagagcctatcactgtagtttataaaaaactagctaagaaagatatttcagaagtaaatgcaatcttggatgtagatgaaacagaccatgttctttctcataaactctttgatagcaagtcaacagctgaaacgttcaatatgtctacagatatctttgtcgttgatacaccttggttgattgaacacttggaagaagaagctaaaaaagaacatccagagaaattgcgctatgttttacgggatttggctgtaaaagagggagctttcgcctacgagtacacgggctatctagccaatattcactctgttaaatcttattatcaagcgaatatcgatatgcttgaatcacaaaaattctattctcttttctcaccaaaccaaaagatttatacaaaggtcaaaaacgaagagccaacttactatgctaatacatctaaggtaagcacttctcagtttgcctctggtagtattattgaaggtcaagtagctaattctgttctatcacgtaatattcatgtccataaggatagcttggttaaagatagcctgctcttccctcgtgttgttattggagaaggggctcaggtcgaatatgctatcttggacaaaggggttgaagttgagcatggtgttgtgattcgaggaactgcagaacatccagttgtggttaagaaaggtgctaaagtaacagaggatattcattcatgaaaattttatttgtagcagcagagggtgcacccttttcaaaaacaggtggtttgggagacgtcattggcgctcttccaaaatcactggtaaaagctgggcacgaagttgcagtgattttaccctactatgatatggtagaggctaaatttggaaatcagattgaagatgtgcttcattttgaggtgagcgttggttggcgcagacagtattgtggaattaagaaaacagtattaaatggtgtaaccttctactttattgacaatcaatattatttcttccgtggtcatgtttacggtgattttgatgacggagaacgctttgcctttttccaactggctgccattgaggctatggaaaggattgactttattcctgatcttctccatgttcatgactaccatacagctatgattcctttcttgttgaaggaaaaataccgttggattcaagcctatgaggacattgaaacagttttaaccattcataatttagaattccaaggacaattttcagaaggaatgttgggtgatttgtttggagttggctttgaacgttacgctgatggcacccttcgatggaacaactgtctgaactggatgaaggcaggtattctctatgcgaaccgtgtttcaaccgtttcacctagctatgctcatgaaattatgactagtcagtttggatgtaatttggatcagattcttaaaatggagtctggtaaagtatctggtatcgtgaatgggattgatgctgatctttataatcctcagacggatgctcttttagactatcatttcaatcaggaagatttgtctgggaaagccaaaaataaggcaaaattgcaagaaagagttggcttgcctgttagagcagacgttccactggtgggaattgtttctcgtttgacacgtcaaaaaggttttgatgtggtggtcgaaagtcttcaccatatcttgcaagaagatgttcagattgttcttttgggaactggcgatccagcctttgaaggagctttctcatggtttgctcagatttacccagacaagctatcaacaaatatcacttttgatgtcaaacttgctcaggaaatctacgctgcttgtgacctcttcctcatgccaagtcgttttgaaccgtgtggcttgtctcaaatgatggctatgcgttatggaaccttgccattggtccatgaagttggaggcttgcgagatacagttcgcgctttcaatccaatcgaaggaagcggtactggctttagctttgacaatctatctccttattggttaaattggactttccaaacagcattggacttgtatagaaaccatccagacatttggagaaacctacaaaaacaagctatggagagtgacttctcatgggatacagcctgcaagtcataccttgacttgtaccatagtttagttaattaatagataaaatcgtatgatgacttcatacgatttttaggctgtttagagaggagaactgatgtctcaagtaaaaggcttgtgtgttttggatgtagatggaaccttaatcctagaagaagtgattgatcttttagggagagaggcaggtcatgaggcggaaatttcgcagattacaagtcgagcaatgcgaggagagttggtctttgaaagcagtttaagaaaaagagtgtccttgttggaaggtcttcctattttggtctttgataacgtcttcaactcaattcatctatcgctaaatgtcccagagttcatctctattctccaaaagaatggcatcctagttggtctggtgtctggtggatttacaccaatagttggagagattagcaaaatcccttggtattgcctatttcactgccaactagcttgaagtcaaagaaggtcttttaacaggaaaattagttggacaaattataagtccccaggtcaaaaaagagactctggaaaaatggagaaagaaactaaaactttctaaagaaagaacggtggcaatcggtgatggggttaataatctattaatgttgaagtcggcgaagttaggaatcgccttttgtgccaaagaagtgctcaaaaaagaaataccacatcatgttgacaagagggattttttagaagttctccctttgattgactgtttagaatgagggaaaatatgaagattgtaattgcaccggattcgtttaaggaaagcttgacagctcaacaggtagctgaagcaataaaaagaggcttccaacaatcgatagcagatgtagaatgtctcctctgccctgttggtgatgggggagaaggtactgtagatgctatccgacattctcttgacctaaaagaaaaatggatccaagtgacagacccttttggacaaaaagaagccatgcgctattttcaaaaaggggaactggcactatttgaagtagctgacttggttggtcttggaaaaattccgctagagaaacgaaatccacttcaaatccaaacttgtggtattggagagttgattcttcatctcatctctaaagggattaaagatatttatatcggtgttggtggcacggccagtaatgatggaggactggggattgctgctggtttaggttatcaattttatgatagggatggaaatgtcttgcctgcttccggtcaatccttattaaacttagcttctgtttcaacagaaaattgctataaaattcctgaaggtgttcaaattcatattttagcagatgtcgtgagtcccttatgtggtcatcaaggtgcgacttacacttttggcaatcaaaaaggtctacatccgactatgtttgcagtcgtagatcaggcgatccaagatttttatgaaaaattctcacctgcaacattagaaattaaaggagcaggagcaggtggaggccttgctggtggtttgtgtgcctttgctcaggcaagtatcgtgtctggaattgatacctgcttggacttaatcaactttgataagaaagtttcagatgctgacttggttgttgttggagaaggaagacttgatagtcaaagctttgctgggaaagcgcctataggtgttgcaaaaagaacccctgttggagttcctgttattgctatttgcggtagtcttgctgaagatttacctcccctaccatttgaaaatatccaagctgtcttttctattttggagaaaagtgaacctttagaagatagtttgaaaaatgccagtttctatctggagcgcacggctgccaatattgggcacttattaaatatgtgcaagatttagctaaaccatttcttccataaggatgttttggctggttcttcctttttaacttcccaaagttttggaaaagcaagtcgaaggtctttttcttctacttgaactggtgcattgctatgaataaccaggccaaaaggagaagtaatatgctcttcagatactatggtggcttgactatcagtttcttttgcttcttttaagtagaaaacttgcttatcaaattcgatagttggtgaaatcttcacaaatagtggctctgctttttcctgaaggttttctaaaataaataaaaagcctttttctaactgagggctatttgctgtgtcaatatctacatatccaagaactctttcctcaaaagtaccaagatagcgtctttgctcatccggatttatttttaacccaccatgagctttttcaagtaattgttttgataaatctgtcatgaaaacagtatatcataaaagttagaataaaacagacaaaagaaagcgattactttataaagttaaggaaaagttgcacaaagataacgttttttcttgaaaaaggaggggttttaaggtattatagaggtgtaaaaaatttaactcataaggagagtaaaaaatgtcaattattactgatgtttacgctcgcgaagtcctagactcacgcggtaacccaacacttgaagtagaagtttacactgaatcaggtgctttcggacgtggtatggttccatcaggagcttctactggtgaacacgaagcagttgaacttcgcgacggtgacaaatctcgttacggtggtcttggtacacaaaaagctgttgacaacgtaaacaacatcattgctgaagctatcattggctacgatgtacgtgatcaacaagctattgaccgtgctatgatcgcacttgacggtactcctaacaaaggtaaattgggtgcgaatgcaatcctcggtgtgtctatcgctgtagctcgtgctgctgctgactaccttgaaatcccactttacagctatcttggtggattcaacactaaagttcttccaactccaatgatgaacatcatcaacggtggttctcactctgacgctccaatcgctttccaagagttcatgatcttgccagttggtgcgccaacatttaaagaagcccttcgttacggtgctgaaatcttccacgctcttaagaaaatccttaaatcacgtggtttggaaactgccgtaggtgacgaaggtggattcgctcctcgtttcgaaggaactgaagatggtgttgaaactatccttgctgcgattgaagctgctggatatgtaccaggtaaagacgtatttatcggatttgactgtgcttcatcagaattctacgataaagaacgtaaagtttacgactacactaaatttgaaggtgaaggtgctgctgttcgtacatctgcagaacaaatcgactaccttgaagaattggttaacaaatacccaatcatcactattgaagatggtatggatgaaaacgactgggatggttggaaagctcttactgaacgtcttggtaagaaagtacaacttgttggtgacgacttcttcgtaacaaacactgactaccttgcacgtggtatccaagaaggtgctgctaactcaatccttatcaaagttaaccaaatcggtactcttactgaaacttttgaagctatcgaaatggctaaagaagctggttacactgctgttgtatcacaccgttcaggtgaaactgaagattcaacaatcgctgatattgcagttgcaactaacgcaggacaaatcaagactggttcactttcacgtacagaccgcatcgctaaatacaaccaattgcttcgtatcgaagaccaacttggtgaagtagctgaatatcgtggattgaaatcattctacaaccttaaaaaataatctctttatgtgattataggctataaagcctttgaaataagcactttggggcgctttcccttagtgctttttataatttaataccctttttactacccctactaatttttggtatagtaagagggtagcccggaaatgggtcacccttattttttataaattgttgatagctgtttcataatttgagacggctttttttgcattctcttggttagtatgccagtaagtattttcagtgatcattaaattagagtggcctaatctatactgaacatctttcgggctaacctgagcatagagcatcatagtagtatgtgtatggcggaaaccatgaaatgatacgttagttactccagcagcatcaaaatgcttatttaggcgtttgcgtaagttacaagcataagcatatttctccgtaaatacagagaatacaactgtttcagatcggcctaatttccaagactgaatttgttgacggtttttgtattgtttcagtaaaagtaatgtggctttgtctattggtatatcacgataaccagcgcttgatttaggtgagtttatttcctgatagcggtttagtgtcttattgatgctgataacaccgctttctaggtcaatatcagaccattcaagagccagagcctcactaatacggcaaccagtggccaataaagtcttatacagaacaacatcaaataagttctcataatttgattgatccagagcatctaaataatcaagaaactgttttaattctttgttgtctaagtatttgacagcagccttttctttttgctgtttgcgtggaacgatgacatcattagctgggttgtattgtattacctggatagctacgccatatttcaaaatacgcttattcatgttatggagcaaagagtagttagcaaatgcccctttttcgcctttatttgccttgtcagcccatttgtttacttgctgttgaagaataggcgtagtaagtttagatagcttgtaatcgccaaatacaggcaataaatgcactctaaccaatccctccatggattggcgagtatttggcttaactgtattcttgtaactatcccaccaaacttttacaagctcattatatgttgtaattgtcggcttgtctttaactgtatagccattagcagcaaaagtattgatcgcatcacgcgcttttactttaacgccctttttagtggttgctgtaacagttgtacgggcttttttgcccgttagttggtcaacgcctagataaacactagcataataaactctttggccattctttttgattttttctttgatattcatgtatttgtacctttctttccatcagcaggcaaggcgcgtggttttgttaggtatttatacatgagatcaaccagttagtttttactaattttgattgttctatgttttgttaattgatcttctaaaatatttacagtgtaaccagaaacatctatattctctaataaaaaacttgattttaatatatgttccaaaattttaggaattactttagaacgttgtcgaacgtacgtactaaatgaaacaatttctgaaggtgcgatatagtcaattttttttaaagacgaattaggaatatcattgccaaagaagttaaaaaatcttgctgtatttatatcatcaatatatatcgtttttgttgactcgttcagtatagctagtaaggcagtgtatagatatttttctttataggtaagtctatacccaaaatagaaatattctcggtttctagtacctccaaaaagtgaatagtcaaaattagataagttatttttcaacaaatttccttgcaaatctctcgattgttcgatagctaaatcaataaattttttgatcgtttcgtctgaaatttgataatcaatcttagaaatggtattttgagcgatctgtaacgctttatttgttatatcatcgtgtaaagagttatactcatcataattttttatacattcaggagctaaatccataatctttaagtgtagataagtattgtaatcgccgtagagtaactcttcaacactcatttttccaatagatgcaatttttagtaggttttctttatttggtaaattgcgacctttttcccagttgttaactgtacctttgctagtattaaatttttctccaaatttttccatagagtcgccatggcttaaacggatattttgaatacgttctccaacgagtttattatttattttcatgttttacacctccttaaagaacataataaactttttttaagaaaaagtaaagaaaagtattgactttataaaaataaagttttataatctaggtatgcaaaagtaaaggaggtatagaaatgagtaaagaaaacaagatgcgtggatataggaatatgctaggtttaacacaagagaaacttggaaaaaaacttggtatatctaagcagagttattacaacaaagaaagtgggaagacacaattttcagataaagaaaaacttaagattaaaaatcttttaatccctttatttccagatattacaatagaagatatattttttaaacagaagtatgcaaaagtaaagagtgcaaaaaatggaattaaagcgaaaataaaagccgtgtacaggcgaccaaaccaacgtacacggctaaggaaaaataacaaaactcaagcaaaggcaaggcgcgtggttttgttaggtatttagcaaggggacaaacccctttgtaaataatctcctcttattttatcaaaattagaggaaaatgacaacttaatttataaaaaggaaaaatggaggatataaatggaaattctgtctaaagaaatacagttacagggcttacaacttcttaaacagactcttgaaactttagttgagctagaaaaacaacgatctagtaagttagatttaatttctcgtaaagaattaatggatctgctaggtataagtgctacaacccttgataactgggaggatcttggtcttaaacgatatcagactccgatggatggagctaagaaagtattctatcgtccgtcagatgtgtatttatttttagcaataaaataggagttatgaaatgaaaattgttactttcaaaccaactaaacaaatagacgatgggttttatctgccaggtattgacattctatttgtctcagacaaagcagatgccaaggataaagaagatgtaattttatttctttcaagaaatgggttaaacaagtcttgaatgatattagaaaataaatctactattccacggaggatatcgatacagcgatacaagtcgttataaaggcctctaacacgtttatagagacaagtggtaaataatattaaccactagccaaagccgttttagaggctaaaaaagaggctagaggaggcaattaaaaagtaagctaaccagatttatacaggaggtagaaccgtaatggaactagtttacatggacggtaagaaagagccgtacaccacaagcgagatcatcgctgaatgtgctgaagtacaacaccacactatcacgcgcttaataagagaaaataaggctgactttgaagagttgggaatacttggatttaaaatccataaattagatactagaggacaacctaaaaaatcctatattctgaacgagcaacaggctacttttctgatcacttatttaaagaataccgaaacagtacggcaattcaaactaaacctagtcaaagcattctttgaaatgcgtgaggaactttctgaaattcgtctgcagagggcgctagaaaaaccgaaaagaaaaaccttgcatgacagtatagaaacatggcctaatgcaccaaagcacgcgcatagcaccatgaacaacttgctactaaaggcagtaacagacatgaacgctaagcagttaagagaagagcgtgggggctataacggtatcgatagcttgactagtgaggagttggagcagtaccaggcatttgaggatatggcaatagctatgattgaattgaaaatgagttatcaggaaattaagacaatgatgtttagaagtaaaaaaataagctaaaaaatcacaccaacaaagaaacagaggtaaaaacatgacagaaacaacatatgagaatttaactagacgtatagacagaattagcgcagaaatgcgagaaattagcgaagaaaatggcctaagaatcctttctttattggaaagtcagacaaaatccatcaaagatgagttgtcccgtttactttggattgaacttcctgaattgaatgaaagccataaaatcgaagcggtctctaaaagcactacgggaatgtttttcgcccctggtatttttgaaatggacgctatgcgaaaagcattctttaaacgccaagctaagcacttttttgagaacgaagcagagcaacaggcgtatatagagcatgctgaaaaggagtatttagaggctactgtaaccttaaaagatattctttttaactctaaaaatggaactcagaaagcaaataaaagttgtcttatagagaagtttgaggaggcaatgcaatgacactagatttagacaacatgacacaagcagaatttgatgaggtaatggctgaaatccagctacaaagtccaaacatttttcaactgatttctgattttgtaaataaaaaagtaaccagtgtggaaatagacgacttgttgaatatgaagcgagctgagacaggtaaagcattgtcaccgttacagattcaagaattgcagtatatgctagaagattttagcccagagcttatccatgaggcgttaaaagaggctgtcagtcagggtaaagcaaactttgcatacatcaaggtaatccttaaccgttggaaacaggacaatttattgacggtggaacttgttagaaatagcagggcagcgcgtgaggctaaaaaacagcaaaccaatcaactagagcctaccagctatgaagattggataccaacacaagaaaaaccattttaggaggtcagaaaatgaaatcattacaatctagtttaggaaatattgagacatttaaactagacgaattgtgtcctaagcatgaaatacagctaacacaaatcaaaggagaaagacatgtagtagtggggtggaatgagaacggagaggcaataaaagaagttcgctgtatcccaccctattgtgaacaatgccaagaagaacagaaaaagcaagatgaagaagatgcgattgctgataatttgaatgctaaactatatatgcaaacttataatgtgttgatgagcaataagagctatgtagcagatgagtttaaaactaaaacttttgatgattttaatgctgtaacatcagaagaaaagcgatttttagaatttgcaaaaggtcaggtacaaaaatatcttgatggcatgaggggaaatacgcttatcacaggaggtacagggattggaaaaacacttttatcagttgctattgccaaaggtataaatgaggggtataagacaaaaggagaacctaagagtgtgctttttgtaagcctaaccgaaatgatcaaacaaattaaagaggggtggaattatggtaaaggtgcaacacttacagagtttgaagctactgaactcatgaagtctgttgattacttaattattgatgatttaggagcaaaaaatgctgttattaagcctaagagtgactgggagcaggatttactctttgacgtgctaaacaatcgtgaaaataccatttttaataccaacctagatagtgatgagcttaagatagtttacaatgagcggaattatagccgtattctaaaaggacttgagggtaacacttttaaggcgtttggcatcaaatataagcggtactcactcaatcagttaaagagtaatatgtgacaatgaattaacttacaaacctaaacaaaaatagacacttttcatggggtgagaaatcgccctttgagaagtaatagccatgctttccacgaccatataaaccaagtgtggcaaactaaccaatttgaaaagtcagccataaggtacacaaaaagggtagtattttagcatacgaaccctaaaaacctagtgaaataaatagactaggggtattcagattataataaaatgaaataaaggagaaaagcatgactgaaaacaaggatgataaattattaaaaatgatggagaaaggctttgttttatactcaaaaaatggtataattaagtatattgaaattccagagcatgggagtattaagctaaaagctcaagatgggcaattagtttataaggaagtgattatcgggaaagtgtatgcagagcaagaacttttaaaatataaaaaagagggcgaaaactattcccaaaatactgctcagctattgtatcagcaactagaaaaagagaaaaatgctgaactagcaaaccatgaatcaaaagaagagcctattacagcagatgatgcagctgaactaagtttattatctagtatcaaattaacagtggcagaaatgagagaatacctagaaaaatataaaaataaacctctagctcttagaaaattagaagatattatggataatgatactacccttgcttatatcgaaattgacatggagcaattcagccaacagcaacgccttgaaaagctagtacatttccttgatagaaaaattgattatttccacggtggtttacttattaacggagataagattgatttagtacagcatgaaatgattgttgagggcaattcagaggcaatggatgcagaattgcagaattatctagcatagggaaataaaggggcaaccctttattttgataatgaggaggtaatagatggcaggaaatgaaaatgataaccttacgtccaagcaaattaaattcatagatgccatgcttaccgagccaacgatagacaaagcatgtcaaaaagcaggggtatcacgcgcaacaggtcataagtatctaaaagttgcagcggttaaaaagacattgaggataaagcaagatgagatgatggataaaacaactcaaatgctttatttagcatcatctaacgctgtttctgtactcaatgatattatgatggacagtaaggtcaacccgtttataagaactcaagcagcaaaggctatacttgaacaatcttataagacccatgaaatttttggagtagtaaggcagattgaagaattgaggttggaaattgaggaagtatctaaaggaaatcaaagagttacaagaactcaaggagttattaagtaatagaaatatgccagagtttattattgttgaaggaaacaatgacttaggggaatttttccaaatagatggcgagctatttagtgataatgaacttttagaaaaccttaaaaaatggcgtgagtgggaagtgccagttattattgatgattggtgcaatcgtatcctaaacgaggatgaaacggaaatactatactttcctactcatgaggataagatgaactatattagggtggaaaaagatttagaacctttgtatcatacatcgaacaagatctatgcaactatttctaaaagtgagtggttagaattgttaaattgatgatttaggaggtagcaatgacaaagaagaaaattgagcgtatttctgtaatacaccgagaaaagattttatggctcaagtggtatttcatgcgagataaagaacaacctaagtatagtgtccttgagcgtaaaatgtttgatgctgctaaaaatcaagatatgctagcttatcaaaaatacgcaactatcaagcagataacagatattagggtacaaacaagtgaggctgacattttagaggctgtaaaagaggtttatgtgtacaatcacatgaatgttatcggagcttgtcagcggatattatttatcagtcaatcaccagcttatgataagttaaataagtggtttaatatctattctgatttgtattttagcgttgtacccttgcccaaaatgggggtatatcatgagatggtaggtatctagttgattgtgtggtataatattctaaagcacaagggatagtatagaaggagtacaccttgatagaggtagccacggtgcgaatccgtgtcattgtgctagcatctaggaaactaggtgctttttattttaataacttaaaagtatttacaaacaataacttttaggttataattgttattaggaagaggtgttaatagtgcataatatctatttttacaaggataaaaacggcaatgagcctgtttttgattatatgcgagagcttaccagtaaaaaagggaaagatagcagaattaagcttaataaaattaatgattatattgagttgttaagccaacatggaacacgcgcaggcgaaccatatattaagcatttagatgctgaaatttgggagctgagaccacttagagatagaattttatttgttgcttggatggatggtagttttgttttactgcatcattttatgaaaaggacacagaaaacacccaaaagagagattgagcaagctaaacgtgaacttgcagatttaaaagaaagaggtttagacaatgaaaaataatgctattggtagtaactggaaagatgtaagagctgaattattcagcaaagaggaaattttggaaagtgatatgcgcgtggctatcatgagtgagcttatcgaggctagaaatgaaaagggtattagtcagaagaaactagaggagatgagcggtgttagtcagccagttatcgctagaatggaaacaggaaagacaagcccacaacttgatacagtattaaaagtgttggcaagtcttggtaagaccttagctgttgtaccattagagcatgagcaggtttagaaagtttaggtgatattttgacagcagaaattggaatattaaataaaaatggtgttgtattggcttctgatagcgctgtaaccttatcagacgggaaaaattcaaaagtttttaatagcgcccgaaaattattcactttatcaaaagaacattccgtggggatcatgatatatgggaacgcttcgtttatggaaattccgtgggaggtaattttaaatgagtttaagcaggctattggcacagatttattagataatactgcccaatacgttgaaaagctaatagaatttttaatttcctttaaacatctacaagttgaggatttattaagaaattatattgtcagaagtacaagaagtattttggacagcattgcctatgaagcgcaagaaacagctgatttaagagtttctaatggtgaaaccatcactctagatgattttaataaaattttattaaatgctataactaattttagtttagaaatttcaaaagtagaagctgaaagtaattttgaattttttgaagctgagttagagttaataaaaagcattgtagacgatgtttttaaatcctttcctcatactgatgatgaggttgaagttattgctaaatctttatataaagcgattttcattggatatgactcaacaaacataactggattagttatagcaggttatggtacagacgagatatttccatctataagacaaattgaattatatggaattttttctaaacgattaatttggaaagttattaatgaaagtgtgataaatcatcataaaacttgtcatataatcccttttgcacagtcagagatggttgagacgattatgaatggtatagatcctaacttaaatgtatatatcgcagagcaagtatcatcagttatggagaaaaatggattgggtgatgaaattgagaatatatttgaaaatatatcatctatacagcaaaaatattatataaatcctataatagaccttattggaatgcaaccacttaatgaaatggcgagtacagctaaaacatttattgaattaacttcatttaagagaaaaattgtcaacactcttgaaacagtaggaggtccggtagatgtacttgctatttctaaaggagaaggaccaatttggattgatagaaaatactattttgacattgataaaaatcttgattacaggatgagaaaggagagttagttatggatttcttaaaccattctttcgatactaaaaaagttattaatacaaaaataaatgcagttaactccaaaaataatgttggaaagaatttcatcgatgtttaccgtgaaatgaaagaagtgccaaacaataaaattcatcaatcaaaagttaacgtggcgttaattaaaaaatagcacccgtaaaggtgctattttcttgcctgctgaactcatcgatttaataccttttttactccccctctagtatattgtaattgtttgtactttacattttagaatgaaaaaggtaaaaagtatattagtaatttagcgtatttaattgaactatttgatattatgataaccttaaaaaataaaatagttcagtgaactattttatcccgaaccatgaaattcaaaagttcggccgttgatttaacaacgtttctagcccctcggattttatccgaagggctatttttgtatttagagggcaaaaaagggacaaaactttttaaaaaatctttttcataactttatccagtacattgattgcttcatctttcatgttctttgtgacgtgggtgtagatggaagtagtgacttcagagtcgggatgaccaaccctgtccgtgattgtttttaaaggaattttattttctgataagatgctaatagtggtgtgtctgaagatgtgaggggacagatgtttgggaattggttttttaaggcgttcgtttgctcgctggagagacttgctcaagatagaactatgaactgtttttcctgtattggtaacaaaaatacggtcgcttttgtgccaattcttatcggttgtttcgcttagacaatttatatagtcaattgaaacaagaacaagacaaaaaagcctcataaaaggtattgcaacttggtaatacctttttgaggtgctttttgatatgagcccatgttttctcaataggattgtactcaggtgagtagggaggaagaggtaaaagtttatacccaaactcttcacacaagagttctagcttccccattctatggaatcttgcattatccataataataaccgatggtgtggttaatgttggtaagagaaacttctgaaaccaagcttcaaaaaagtcgctcgtcatcgtctcttcgtaagtcattggagcgattaactcaccatttgttagacctgcaaccaaagaaatcctctgatatcttcttccagatactttgcctcttattaactgaccttttaatgagcgaccatattctcgataaaaataagtatcgaatcctgtttcgtcaatctaaacaggtgttaggtgctttaaactattaaaattcttaagaaataaggctactttttctgggtcttgttcatagtaggtgtggttcttttttcgagtgtagcccatagctttgagcgcatagtggatggtagttggatgacagccaaagtcagaagctatttcagtcaaataagcatctggattgtcagtaagatagtttttaagtctatctctatcaacttttcttggttttgttccttttacttggtggtttagctctcctgttttctcttttagctttaaccagccataaatggtattacgtgagatttggaaaacgtgtgatgcttctgttatactacctgttcgctcacaataagagagaacttttttacgaaaatctattgaatatgccataagaagattataccacattgtgtactatttttggttcattttattatagtagattgaaataagatacgaatagcttgattagggaaatcaaattaatttctagaaatattttagcatccacggtgtactattatagtttcaatttactatagttcaatcattctatcaagaatattgaatatataaaggcacgtaatattaaaacttcttctgatatcgaattagagtccgatgttgatggcgataaatcagacaatctaccagtcgacattaagatactgggacaacacattgaagtgtattccgtacctaagaaacaatcataaaactcaaagccttgttaccgaggcttttttattatgtgattttcagtagccagacttattctatctaatacaagtaaagctaagtatttaagatttagcagatgatgaagaaaagaaaggatggcctaaatattttaacagatttacgaggctaatcatggtataatatagggtgatgaaaaattccaacgaggctgagatgaaattactttatactgatattcggacttctttgacagaaattctaacaagagaggcagaagagctagttgcagctggcaagcgggtcttctacattgcccccaactctctttcttttgaaaaggaacgcgccgtgctggaatacttgtcccagcaggcttctttttcgattaccgtcacgcgctttgctcaaatggctcgctatctggtcttgaatgatttaccagctaaaactactcttgatgatatcggtcttgggttggccttttacaaatgccttgccgaactcgatcccaaggacttgcgtgtttatggcgctattaagcaggatcctcaattgatccagcagttaattgagctttaccatgagatgaccaaatctcagatgagttttttggacttggagaatttaacagatgaggataagagggcggatttactcttgatttttgagaaagtaacagcctatcttaatcaaggtcagttagcccaggaaagtcagttgtcccatttgattgaggctattgagaatgacaaggtaagtagtgattttaatcaaatcgccttggtcattgacggctttactcgtttttctgctgaggaagagcgggttgtggacttacttcacggcaaaggtgttgagattgttatcggggcttatgctagtaagaaagcctataccagtccttttagcgagggcaatctctaccaagccagcgtaaaatttctccatcatctggcttctaaataccaaacgcctgctcaggactgttctcaaactcatgagaagatggatagttttgacaaggcctctcgtttgttggagtcttcttatgacttttcagaactcgctttggatgtcgatgagaaagaccgtgaaaatttacaaatctggtcttgtttgacgcaaaaggaggagttggagctagtagcccgtagtattcgtcagaaattacatgagaactcagacctgagctacaagcattttcgtattctcttgggggatgtagcttcttaccagttatctctcaaaaccatttttgaccagtatcagattcctttttatcttggtagaagcgaagccatggctcatcatcccttgactcagtttgtcgagtctattttagctttaaaacgttaccgttttcgtcaggaggatttgattaatcttcttagaactgatttgtatactgacctcagtcagtctgatattgatgcttttgagcaatatatccgctatcttggtatcaatggcttgccagcctttcagcaaaccttcaccaaatcccaccatggaaaatttaatcttgagcgtttgaatgtcctccgcctgagaattttagcacctcttgaaaccctctttgccagccgaaaacaaaaggctgaaaaactcctacaaaaatggagtgtctttctaaaagaaggagctgtgaccaagcagttacaagatttgacaaccactttggaagctgtagaacaggaaagacaagccgaagtttggaaggctttctgccatgttttagaacaatttgcgactgtttttgctggttcacaggttagtctggaagacttcctagccttgctccattctggaatgagtttgtcccaataccgtaccattccagcaacagtggacactgttctggtgcagagttacgatttgattgcaccattgactgctgactttgtctatgctattggactaactcaggacaatttaccaaaaatttctcaaaacaccagtcttctgacagatgaagaaaggcaaaacctaaaccaagcgaccgaagaaggcgttcaattactgattgccagcagtgaaaatctcaagaaaaatcgctacactatgctttccttggtcaattctgctcgtaagcagttgttcttgtcggctccaagcctttttaacgaaagtgaaagtaaggaatctgcctatcttcaagagttgatccattttggatttaggcggagagagaagaggatgaatcacaaaggactgtctaaggaggatatggggtcctatcacagtcttttgtctagtctggttgcctatcaccagcagggtgagatgagcgatactgagcaagatttgacttttgtcaaggttctgtcgcgtgtcataggtaaaaaactagatcagcaaggtctggaaaatccagctatcccaaccagtccaagcagcaagaccttagccaaggacaccttgcaagctctctatcctgccaaacaggagttttacctgtctacgtcgggtttgacagagttttatcgcaatgaatacagttatttcctacgctacgttttaggcttgcaggaggaattacgtttgcatcctgatgcccgtagtcacgggaatttcttgcatcgtatctttgaacgcgccttacagttgcctaatgaagattcctttgaccaacgtctagaacaagctattcaagaaaccagtcaagaacgcgaatttgaagctatttatcaagaaagtttggaagcccagtttaccaaggaagttttgcttgatgttgcacggacaactggacatattctccgacacaatccagccatcgaaaccatcaaagaagaagcaaattttggtggaaaagaccaagcctttattcaattagacaatggacgcagtgtctttgtacgaggcaaggtggaccggattgaccgtttgaaagctaatggagcgataggagtagtagactacaaatccagtctgactcagttccagtttcctcatttctttaatgggctcaattctcagttaccaacctatcttgctgccctaaaaagagaaggggagcagaactttttcggcgccatgtacttggaaatggctgaacctgtccaatctctgatggcggtaaaaagtctggcaggagcagtggtagaagccagcaaatctatgaaataccaagggctcttcttggaaaaagaaagcagttatttaggcgaattttataacaaaaacaaggctaatcaactgacagatgaggaatttcagctcctactggactacaatgcctatctttacaagaaagctgctgagaagattttagcaggccggttcgccatcaatccttatactgaaaatggcagaagcattgccccatacgtccagcaacatcaggctattacaggctttgaagccaattaccatctgggccaagcccgtttcctagaaaagttggacctagctgatggcaagcgtctggtcggagaaaaactcaagcaagcttggcttgaaaaaataagagaggagttgaatcgatgaagcttattccctttttaagtgaggaggagattcaaaaactgcaagaagcagaagcaaattcgagcaaggaacagaagaaaactgccgagcaaatcgaagctatctacacttctgcccagaatatcctggtctcagcatcggctggttctggaaagacctttgtcatggcagagcgcattctggaccaattggcgcgtggtgtcgaaatttctcaactctttatctcaacctttaccgtcaaggctgcaactgaacttaaagaacgtttagagaaaaaaatcagcaagaaaatccaagaaacagatgatgtcgacctcaaacaacacttgggtcgccagttggcagacctacccaacgctgccattggaaccatggattctttcacacaaaaattccttggcaaacatggttatctgcttgatattgcacctaatttccgtattttacaaaaccaaagcgagcaacttattctcgaaaacgaagtctttcatgaggtctttgaagcgcattaccaaggtaaacagaaagagacctttagtcatttgctgaaaaactttgctgggcgtggcaaggacgaacggggtctgcgccagcaggtctataaaatctatgacttcctccaatccaccagtaatcctcaaaagtggctgagtgaatctttcctcaaaggatttgagaaagctgattttaccagtgaaaaagaaaaactgaccgagcaaatcaaacaagccctttgggatttggaaagctttttccgttaccatctggataacgatgccaaggagtttgcaaaggctgcctatttagaaaatgttcagttaattctggatgaaattggctccctaaatcaggagtccgatagtcaggcttatcaggcagtgcttgcgcgtgttgtcgccatctctaaggagaaaaacggtcgagctctgactaatgccagccgtaaggctgatttgaagcccctggctgatgcctacaacgaagagagaaagacccagtttgctaaactaggacaattatcagaccagatagcgattctcgactatcaagaacgttatcatggagacacttggaaactagctaaaaccttccaatctttcatgagcgattttgtagaggcttatcgtcagagaaaacgacaggaaaatgccttcgaattcgctgatatcagccattacaccattgagattttagagaatttcccacaagttcgtgagtcttatcaggagcgcttccatgaagtcatggtcgatgagtatcaggataccaaccatattcaagaacggatgctggaattgttgtctaatggccacaatcgctttatggtgggagatatcaagcaatccatctatcgtttccgtcaggcagacccgcagattttcaatgagaaattccaacgctatgcgcaaaatccccaagaaggcaggctcattatcctcaaggaaaatttccgtagtagttcagaagtgctgtcagcaaccaatgatgtctttgaacgtctcatggaccaagaggtcggcgaaatcaactatgataacaagcaccagcttgtttttgccaataccaaactgactcccaatccagacaacaaggcagcatttctcctctacgacaaggacgatacaggtgaggaagaagagagtcaaacagaaacgaaactaacaggcgaaatgcgcttagttatcaaggagattctgaaacttcatcaagaaaaaggtgttgcctttaaggaaattgcccttctgacctccagccgcagtcgtaatgaccagattctcctcgccctgtctgagtacggaattcctgtcaaaactgacggagagcaaaacaattatctccaatccctagaagtgcaagtcatgctagacactcttcgtgtcattcacaatcccctgcaagactacgccttggttgcccttatgaagtctccaatgtttggttttgatgaggatgagctagcacgtttgtcccttcagaaagcagaggataaagtccacgaaaatctctatgagaaactggtcaatgcacaaaaaatggcaagtagtcaaaaaggcttgattcacacagctctagctgaaaaactaaagcaattcatggatatcctagcttcttggcgcttgtatgccaaaacccactctctctatgacttgatttggaagatttacaacgaccgtttttattatgactatgttggggctttgccgaatggtcctgctaggcaggccaatctctatgccctagcactgcgtgctgatcaatttgaaaagagcaatttcaaaggtttgtcgcgttttattcgtatgattgaccaagtcttagaagcccagcacgatttggcaagcgtggccgtcgcaccgccaaaagatgcagtagagctcatgaccatccacaagagtaaagggctggagtttccttacgtctttatcctcaatatggatcaagatttcaacaagcaagactctatgtcagaagtcattctcagtcgtcagaatggtcttggtgtcaaatatattgccaagatggagacaggggcagtagaagaccactatcctaaaaccatcaaactctccattcctagtctgacctataggcagaacgaagaggaattacagctagcaagctattctgagcagatgcgtttgctgtatgttgctatgacgcgggctgagaaaaagctctatcttgtcggcaagggttctcgtgaaaagctggaatccaaggaatacccagcagccaaaaatgggaaactaaatagcaatactagactgcaagcacggaatttccaagattggctttgggctatcagtaaagtgtttactaaggacaagctcaactttagttatcgttttattggcgaagatcagttgaccagagaagctatcggagagttggaaaccaagagtcctctccaagatagctcccaagcagacaatcgtcagtcagataccatcaaagaagctctggaaatgctgaaggaggtggaagtttataatactcttcaccgcgcagctattgaacttcctagtgttcaaaccccaagtcaaatcaagaaattctacgaaccagttatggatatggaaggtgtcgagattgctggtcaaggtcagtcagtaggcaagaaaatcagcttcgatttgccagatttttcaaccaaagaaaaggtaactggagctgagattggtagtgctactcacgaactcatgcagagaattgacctcagccagcaactaacccttgctagcctaacagaaacactcaaacaagttcaaactagccaagctgtcagagacaagatcaatcttgataaaattcttgctttctttgacacagtactcggtcaggaaattcttgctaataccgaccatctttatcgcgagcaacctttctccatgctcaaacgagaccaaaagagtcaggaagactttgttgtccgtggtatccttgatggctatctgctttacgaaaacaaaattgttctgttcgactacaagacagaccgctatgatgaaccaagtcaactcgtagaccgctatcgtggtcagttagctctatacgaagaggctttatcacgagcctattcgattgaaaatattgaaaaatacttgattttactcggtaaagacgaggttcaagttgtaaaagtataacttatactctttgaaaatctcttcaaaccacgtcagcttcgccttgctgtatatatggttactgacttcgtcagttctatccacaacctcaaaacagtgttttgagctgacttcgtcagttctatctacaacctcaaaacagtgttttgagctgattgcggctagctttctagtttgctctttgatttttattgagtattagaaaggagacctcatgacacttccagttagaaaatccctgcacgatgcagttttacaggcttcgaaagcggatacttgggaacaagctaccaaggaatggaatgaagtttcctttatttttaacggtatcggccgtagcaattgtgtctgtggaaatgccatcaaatacgcttatgaactctttaacggtgtcacaggccaacgcctctttccaattggtagcgactgtgttcgtcattttcatcgattgtcccttgaccagcaattggaagaggaagaaaaactgctcagaaaggttgaaaatctaaccagaaaagctcagaaaaaggaaaaaatcaaggtcaataaaagtaactttgacgagcgacttctaaaatggctctgggaaaaaggtgttttcaaacccaatcgtggcaatcaatttgcgcctgagagagactaccagcttttcctagaagtctttcagggaggaagttggaccaaggcggaaccaaagaaaaaggctcggatggaagaagtccttgaaaagtgtatcaaaccctttttacttgggaaatcggatgaccaactctaccttgtcaagctaggcaaggagaaaattgactacgaacaagaactccgtatccaggcagagaaagaacgcaagaagagggataaaatcgccaagcaatatgcagacaatctggttctagccatgggacccgcagagcgtgcttatcaagattactttggctttacagagaccctgactcaagaagaacgcaagtgggaaaaaattctttttggtaaaaatagagcagaacgagctatcaaggccaaacaataccaaaaagagctggaaaaagaccaacgaattgccagtcaggatccaattgaaagaaaacagaagcagacttggatcctcaattcctattttcgtgagcttcctgaagaaaaagctcgattttctagactcttattagaatatagaaaaagtggtgaagtacccttttcaactgaatacctgtcagatcatctcatcgactttttctataaaatgaaagcctttgaatttgaaatcgcaccagaacaagtccgagattttctaaaaaaaagcctgcaggaagaccatcgctcatcagcacaaggaagctggatagaaggaattctcctcaactgcctcaaaccatttttagaacgattagtgatatgagtaacacctaccgtgtaaatttcatggtaggtgttattgtacctccaaataatataaaacaaagtatgaaagcgcatctcaattttaagacttttttgtaaattaagagtataattaaggtatactgccttttctatagataatagataatacactaatataataaaggtctttgtaacatatataaattttatttcaaggaggaataatggaaaagtattttggtgaaaaacaagagcgtttttcatttagaaaattatcagtaggacttgtatctgcaacgatttcaagtttattttttatgtctgtattagctagttcatctgtggatgctcaagaaactgcgggagttcactataaatatgtggcagattcagagctatcatcagaagaaaagaagcagcttgtctatgatattccgacatacgtggagaatgatgatgaaacttattatcttgtttataagttaaattctcaaaatcaactggcggaattgccaaatactggaagcaagaatgagaggcaagccctagttgctggtgctagcttagctgctatgggaattttaatttttgctgtttccaagaaaaaggttaagaataaaacggtattacatttagtattggttgcagggataggaaatggtgtcttagtttcagtccatgctttagaaaatcatcttttgctaaattacaatacggactatgaattgacctctggagaaaaattacctcttcctaaagagatttcaggttacacttatattggatatatcaaagagggaaaaacgacttctgagtctgaagtaagtaatcaaaagagttcagttgccactcctacaaaacaacaaaaggtggattataatgttacaccgaattttgtagaccatccatcaacagtacaagctattcaggaacaaacacctgtttcttcaactaagccgacagaagttcaagtagttgaaaaacctttctctactgaattaatcaatccaagaaaagaagagaaacaatcttcagattctcaagaacaattagccgaacataagaatctagaaacgaagaaagaggagaagatttctccaaaagaaaagactggggtaaatacattaaatccacaggatgaagttttatcaggtcaattgaacaaacctgaactcttatatcgtgaggaaactatggagacaaaaatagattttcaagaagaaattcaagaaaatcctgatttagctgaaggaactgtaagagtaaaacaagaaggtaaattaggtaagaaagttgaaatcgtcagaatattctctgtaaacaaggaagaagtttcgcgagaaattgtttcaacttcaacgactgcgcctagtccaagaatagtcgaaaaaggtactaaaaaaactcaagttataaaggaacaacctgagactggtgtagaacataaggacgtacagtctggagctattgttgaacccgcaattcagcctgagttgcccgaagctgtagtaagtgacaaaggcgaaccagaagttcaacctacattacccgaagcagttgtgaccgacaaaggtgagactgaggttcaaccagagtcgccagatactgtggtaagtgataaaggtgaaccagagcaggtagcaccgcttccagaatataagggtaatattgagcaagtaaaacctgaaactccggttgagaagaccaaagaacaaggtccagaaaaaactgaagaagttccagtaaaaccaacagaagaaacaccagtaaatccaaatgaaggtactacagaaggaacctcaattcaagaagcagaaaatccagttcaacctgcagaagaatcaacaacgaattcagagaaagtatcaccagatacatctagcaaaaatactggggaagtgtccagtaatcctagtgattcgacaacctcagttggagaatcaaataaaccagaacataatgactctaaaaatgaaaattcagaaaaaactgtagaagaagttccagtaaatccaaatgaaggcacagtagaaggtacctcaaatcaagaaacagaaaaaccagttcaacctgcagaagaaacacaaacaaactctgggaaaatagctaacgaaaatactggagaagtatccaataaacctagtgattcaaaaccaccagttgaagaatcaaatcaaccagaaaaaaacggaactgcaacaaaaccagaaaattcaggtaatacaacatcagagaatggacaaacagaaccagaaccatcaaacggaaattcaactgaggatgtttcaaccgaatcaaacacatccaattcaaatggaaacgaagaaattaaacaagaaaatgaactagaccctgataaaaaggtagaagaaccagagaaaacacttgaattaagaaatgtttccgacctagagttatacagtttgtcaaatggtacttataaacaacacatttcgttagagcaagttccaagcaatccaaatagctactttgttaaagtgaaatcttcttcattcaaagatgtatacctaccagtagcatcaatatcagaggaaagaaaaaatgataaaatcctttataaaatcacagcaaaagtagagaagcttcagcaggagatagaaagcagatataaagataattttaccttctatctagctaagaagggaacagaagaaacaacaaactttacttcctttagtaatctggtcaaagctataaaccaaaatccctctggaacctatcatttagcggccagcctgaatgctaacgaagtggagcttggtcctgatgaaagatcctatatcaaggacacctttactggtcgtttaatcggtgaaaaagatggcaagaattatgctatctataatttgaaaaaacctctgtttgaaaacttgagtggtgctacagtagaaaaactgagtctaaaaaatgttgctatttcagggaaagatgatatcggttcactggcaaatgaagctcagaataacacaaaaattaagcaagttcacgtcgatggtgttctggctggtgaacgtggtatcggtggtttgctggctaaggctgagcaatcaagcatcacagagagcagtttcaagggaagaattatcaacacttatgaaacgactgctgcctacaatatcggtggtatggtcggtcatttgacaggtgacaaggctttacttactaagtcaaaagcgacagtagccatttcatctaacacaaatacttcagatcagactgtgggtggacttgcaggcctagtagaccgagatgcacagatccaagatagctatgctgaaggtgatatcaacaatgtcaagcactttggtagagtcgctggagtggcaggcaatttgtgggatcgaacttctggtgatgttaggcatgctggaagtttgaccaatgttctcagcgatgttaatgtaaccaacggaaatgccatcactggttaccactataacgaaatgaaggtaaaggacacattcagcagcaaggccaacagagtctacaatgtcaccttggtcaaggatgaggtcgtcagcaaggaatcctttgaagaaagaggaacaatgctagatgcttctcaaattgcaagcaaaaaagcagaaatcaatcctctcattttaccaacagtggagccactttcaacaagtggcaaaaaagacagtgatttttctaaggtggcctattatcaagctaagcgcaacttgacttataaaaacattgaaaaattgctacctttctacaacaaggcaaccatcgtcaaatacggaaacctggtcaatgagaacagtcttttatatcaaaaagaactcttgtcagcagtcatgatgaaggacaaccaagtcatcacagacattgtttctaacaaacagactgcaaacaaactcttgcttcactacaaggatgatttatctgagaagctggatctcaaataccagaatgatttcgccaaattagcagaatatagtctgggcaatactggacttctctatacgccaaaccaattcctgtatgaccaaacctctatcatcaagcaagtcttacctgacttacaaaaggttgactatcattcagaagccatcagaaagacgctgggtatttctccaaacgtcaagcaaactgagctctatctagaagaccagttcgccaaaacaaaacaacaactggaagacagtttgaaaaaactcttgtcagcggatgctggactggctagtgctaaccccgtcactgaaggttatcttgtagataaaatcaaacgcaacaaggaagccttgctacttggcttgacctatctggaacggtggtataactttagctatggtcaggtgaatgtcaaagacctagttctgtaccatttggacttctttggtaaggggaatgcttcaccattagatactctgattgagttgggtaaatctggctttaacaatcttctagctaagaataatgtcgatacttatggtatcagtcttgccagtcaacatggaacgacagatttgtttagcacgctggaacattaccgaaaagtctttttaccaaatacaagcaataatgactggtttaaatcagagactaaggcttacattgtcgaagaaaaatccactatcgaagaggtgaaaacgaagcaagggttagctggcaccaagtattctatcggtgtttatgatcgtatcacgagtgccacatggaaataccgcaatatggtcttgcctctcctgaccttgccagagagatccgtatttgtcatctcgaccatgtctagtctaggatttggagcttatgatcgctaccgcagtagtgaccataaagcgggcaaggctctcaatgattttgttgaagaaaatgcgcgtgaaacagccaaacgtcagcgagatcactacgattattggtatcgtattttagacgacaatgcacgtgaaaaactttatagaaatattttgctttacgatgcttataaatttggcgatgataataccgtagggaaagctacagaagtggcagattttgataatccaaatcctgcaatgcaacatttctttggacctgttggaaataaagttgggcataatcaacacggtgcttatgctacaggtgatgcagtttattatatgggttatcgaatgttggataaggatggagctattacttatacgcatgagatgacacatgactcagatcaggacatttatcttggaggatatggtcgaagaagtggcttgggaccagagttctttgctaaaggattattacaagcaccagaccatccagatgatgcgaccattaccatcaactccatcttgaaacattcaaaatctgatagtacagaaagtcgacgattacaagtacttgatccaactacaagatttaataatgcagatgatttgaagcaatatgtccacaacatgtttgacgttgtttatatgttggaatatctcgaaggaaattcaattcttaaattggatacgaatcaaaaacaacaacttcttagaaaagttacaaatgagtaccatcctgatcctgatggaaataaggtctatgcaacaaatgttgtcagaaatctaacagtagaagaagttgaaagactacgttcattcaatgatttgattgataataatattctttcgtctagggaatatgcctcaggtaaatacgaaagaaatggctacttcactattaagttatttgcaccgatttatgctgcattaagtaatgatataggaacaccaggtgacctgatgggacgtcgtatagcctatgaactactagctgctaaaggctttaaagatggtatggtaccatatatctcaaaccaatacgaagaagaagccaaacaaaagggcaagacaatcaatctctacggtaaaacaagaggtttggttacagatgacttggttttggaaaaggtatttaataaccaatatcatacttggagtgagtttaagaaagctatgtatcaagaacgacaagatcagtttgatagattgaacaaagttacttttaatgatacaacacagccttggcaaacatttgccaagaaaactacaagcagtgtagatgaattacagaaattaatggacgttgctgttcgtaaggatgcagaacacaattactaccattggaataactacaatccagacatagatagtgaagtccacaagctcaagagagcaatctttaaagcctatcttgaccaaacaaatgattttagaagttcaatttttgagaataaaaaatagtgtctactattaggaaataaagtttaaaaaggtgatgaagaacaaaccaagattcaagcaggaattcctactgataatgaagtaagttatgatcttatttatcagcaggaaactcttcctgcaacaggttcatcaacttctgagcttacagctttaggcctattagctgttggtagtttagttcttttggttcataatatgacgggaacagttttttgctccctctgaaaagtcatcatttgatggcttttttctatatagggtaaaagatagggtaaaaggctatcatcggacaaaataaagaaggcatgatataatataaagtagatttctatgtcataaaacaagaactgtttggacatcattcatttgaaaactctctatgttcaaacaatagtaaaataaaataggggatctaaatccttgctatgaaaggaaaaaactcaatggctactattcaatggtttcctggtcacatgtctaaagctcgtcgacaggtgcaggagaatttaaaatttgttgattttgtgacgattttagtagatgcacgcttgcctctatctagtcaaaatcctatgttgaccaagattgttggtgataaaccaaaactcttgattttaaacaaggccgacttggctgatccagcaatgaccaaggaatggcgtcagtattttgaatcacaaggaatccagacgctagctatcaactccaaagagcaagtgactgtaaaagttgtaacagatgcggccaagaagctcatggctgataagattgctcgccagaaagaacgtgggattcagattgaaaccttgcgtactatgattatcgggattccaaacgctggtaaatcaactctgatgaaccgtttggctggtaaaaagattgctgttgttggaaacaagccaggggtcacaaaaggtcaacaatggcttaaaaccaataaagacctggaaatcttggatacaccggggattctctggcctaagtttgaggatgaaactgttgcacttaagttggcattgactggagctatcaaagaccagttgcttcctatggatgaggttaccatttttggtatcaattatttcaaagaacattatccagaaaagctggctgaacgcttcaaacaaatgaaaattgaagaagaagcgcctgtgattattatggatatgacccgcgccctcggtttccgtgatgactatgaccgtttttacagtctcttcgtgaaggaagtccgtgatggcaaactcggtaactataccttagatacattggaagacctcgatggcaacgattaaagaaatcaaagaattccttgtgacagtcaaggagttagaaagccctatttttttagagcttgaaaaggataatcgctcaggagttcaaaaggaaatcagcaagcgtaaaagagccattcaagctgaattagatgaaaatttgcgcttggaatccatgctttcttatgaaaaagaactttataagcaaggattgaccttaattgcaggtattgatgaggttggtcgtggtcctcttgctggtcctgtagtcgctgcggccgttattttatctaaaaattgtaagattaaaggtctcaacgacagcaagaaaattcctaaaaagaaacatctggagattttccaagccgttcaagaccaagccttgtcgattggaattggtatcatagataatcaggtcatcgaccaagtcaacatctatgaagcaaccaaactagccatgcaagaagcaatctcccagctcagccctcaaccagagcaccttttgattgatgccatgaaactggacttgcccatttcacaaacctccattatcaaaggagatgccaactccctctctatcgcagcagcatctatagtagccaaggtaacacgtgatgaattgctgaaagaatacgatcagcagttccctggctatgatttcgctactaatgcaggatatggcacagctaaacatctggaaggcctcacaaaactaggagttaccccaattcaccgaaccagctttgaacccgttaaatcactggttttaggtaaaaaagaaagttaattgaaaggaaataacatggaggaacagtcggaaatagtccgttctaagaaagaattcgcctttgcatccagcactatactatcccaagttggtcgaggaatcattgtcggcctcatcgttggaattatcgtcggatcctttcgtttcttaattgaaaagggcttccacctgatacaaggagtttatcaagatcaagggtacttagtgcgcaatctttttgtactggttttgttttatatactcatctgttggctcagtgccaaactaacacggtcagaaaaagatattaaaggctcaggaattcctcaagtcgaagccgaactgaaaggcctcatgtccctcaactggtggggcattctttggaaaaaatatgtgctaggtattcttgctattgccagtggactcatgctgggtcgagagggacccagcattcaacttggagcagttggtggtaaaggaattgccaagtggctcaaatccagtccagtagaggaacgttccttgattgccagtggagctgcagcaggtttagccgcagcctttaatgctcctattgcagcacttctctttgttgtagaagaagtctatcaccatttttcgcgctttttctgggtctcaactctagcagccagcatcgtagcaaactttgtgtctctactcatgttcggtttgacaccagtattggatatgccagataacattcctcccatgaccctagatcagtattggatatatctcgtcatgggaattttccttggattttcaggttttctctatgagaaagctgtattaaacgttggaagagtttatgacttgattggtcaaaaaatccatttggatagggcttattatcccatcttggcttttatccttatcataccagtcggaatcttcttacctcaaatcattggtggcggaaatcagcttgtcctttctttaactgaacaaaattttagtttccaagttttattagcttactttttaatccgctttatttggagtatgattagctatggaagtggactgccaggaggaattttcctccccattttagctcttggttctttgcttggtgccttagttggtgttatctgtgtcaatcttggacttgtcagtcaagagcaattccctatatttgtcattctaggaatgagtggctattttggagccatatcaaaagctcccttaaccgctatgatcctcgtaactgagatggtaggagatattcgcaaccttatgccacttggtcttgtcactcttgtttcttatattatcatggatttgctcaaaggtacgccagtctatgaagccatgctggaaaaaatgcttccagaagaagtatctagcgaaggagaagttacacttatcgaaataccagtttctgataaaattgctgggaaacaagttcatgaactcaacttaccacacaacgtcctcatcacaactcaagtccataatggcaagagccaaacagttaacggctcaaccagaatgtatctgggtgatatgattcacctggttattccaaaaagtgaaattggaaaagtcaaagatttgttgttgtagtatgagtatttacataatttatgttatgtaaatgatcagtttgatttatttagaaaaccgattctcaggaatgagatcggttattttttactgatgaggaattttacatataaataattgaactttattaaaaataagactataattaagttagaaatgataaagtataaagctagaaaggagtttactgtatcaaatctgtacagtaagattaaaatcatgaaaaagaaaacaatagcaattatatagagaaatgaaatagaaataggataaaacaatcaggacaatcaaatcaatttctagcaatgttttagaagtccagatgtactattctagtttcaatctattatacaatgtgttttgtatctcatagctccttatatagctcttcagttatgtagtattaacagaagtttagtgggtgagatttttattattttccttattctgttttgtttgtaggtctaagtctttttatcactttgaaaaactcctataacatctttccgaaaaactataattttcttgaaaaatatacaagtctatgctatactactagtatacttacttatggagaaaatacatgaaacgtgagattttactggaacgaatcgacaaactaaaacaactcatgccctggtatgttctggaatactaccaatctaagctggctgtgccctacagttttacaaccctgtacgaataccttaaggaatatgaccgatttttcagctgggttttggagtctggtatttcaaacgctgataaaatatccgatattcctttatcagttttggaaaatatgtctaagaaagacatggaatcctttatcctttatctacgtgaacgtcccttgctgaatgctaatacaacaaaacaaggtgtttcacagacaactatcaatcgaaccttatcagcactttctagtctttacaagtatctaaccgaggaggttgaaaacgatcagggggaaccttatttctatcgtaatgtaatgaaaaaagtttccaccaagaaaaagaaagaaacccttgctgccagagctgaaaatatcaagcaaaaactctttctaggtgatgaaacagaaggttttctaacttatatcgatcaagagcacccacaacagctttcaaatcgagctctctcatcattcaacaaaaataaagaacgagatttagccattattgcccttctcttggcatctggtgttcgcttatctgaagctgttaatctagatctaagagatctcaatctaaaaatgatggttattgatgttactcgaaaaggttgcaaacgtgactcagtcaatgtcgctgcttttgctaaaccttatttagagaattatctggccattcggaatcaacgctataaaacggaaaaaacagatacagccctttttttaactctctacagaggtgttcctaatcgtatcgatgcttctagcgttgagaaaatggttgctaaatactcagaggattttaaagtgcgtgtaacaccccataaactgcgccatacactagcaactaggctctatgatgcgactaaatcacaagttttagtcagtcaccaactaggacatgctagcacacaagtcactgacctctatacccatattgttagtgatgaacaaaagaatgctctggatagtttatgattttacgtattttaaattatgtaaataaatatcaaaaaaagaagttggccaacttctttttgatttatccaactaccgcttcagcgatttcttcacggctaataccagcgaagtagcgtgtgatatcaatggtttttagcgccttaagaacatcttcgcgttcgtatttcaccccacgaaggacatcttctactgcagcaacgtcttcaataccaaagaagtcaccataaatcttgatgtcttggatttttgattcagtaacgttagcaaagacttcaaccttaccactagtgaatttgattccacgacggacgttaaattcaggtgatttaccatagttccagtcccaagttccaaacttagtatccttgatgcgattgatttcggccaattcttcttctgaaaagacgtattcagtcatctctgggtactcttttttcatgtattccaagagtaaatcacggaatttttcgactgtgattttttttggtaattcattgataatattggttacacgggcacggacggatttcacaccttttgattcaaatttatcttttgaaaccttaagggcatttgcgaggactgacaaatcaacgtcaaagagcaagcaaccgtggtgcatgatacggccgttgatataggcttgggcattgccacagaacttcttaccatcaatctcaaggtcattacgacctgtgaactcagctttaaccccaagttgagccagggtattgataaccggagttgagaagctcttgaagtcaaatgccttattttcatcttctttggagatgatcgtgtagttgaggttatttaaatcgtggtaaacagctccaccaccactaatacggcgaactacctcaataccattttcgcgaacataatcacggttgatttcttcgatagtgttctggtgacgaccaacaatgatagatggcttgttaatccaaagtaggaagatttgatcctcatccaaaaggtgtttaaaggcgtattcttccaaggcaatattaaaagcagtgtcatttgaatgattgataatgtatttcatgatatccctttactttatatgatagaaactggaaataaccttccagtctaatctatcttcgttttattttttcttaggtgaatggatggccattcctagaacatctgcaaacgcttcgtacatcacttcagagtaagttgggtgcccgtggatggtcttcagcatttcctcaacagtgatttccatttcgatgatgcttgatgcttcgtttattaattctgcggctgcaggaccaataatgtgtacaccaaggatttctccgtatttcttatcagcgataacttttacgaaaccttgagctgcgtcagatgcaatagcacgaccgttagcagcaaagttaaacttaccgatggcaacatcgtatttctcacgggcttgttcttctgtcaaacctactgctgctacttcagggagagtgtagatggctgcaggagtcaaattcaatttggcaactgcatgatttcctttaagggcattttcagcggaaacttcacccatgcggaaagctgcgtgagccaacatcttagtaccgttgatgtcacctggtgcataaatgcctggaactgaagtttccatgtattcgttgaccttgatacaaccacgatccaattcaaactcaacctctccaataccttcaaggtctggcatacgaccaattgaaagaagagctttgcttgcgatgatatcgtcttttccttcaaccttgatacgaagttgaccattttcctcaatgatttcttgcagtttagtaccagtcaagatggtcattcctttacgctcaagaatcaagcgaaggttcttagaaacttccacatccatagctggaactatacggtccatcatttcgataacagtcacttttgaaccaaatgtcatgaaggcctgaccgagttcgataccgacaactccaccaccgatgataacaaggctttctggcacttcgttcatttcaagaatgtcatcactagtcatgacaagtggagattccataccagggacgttgatcttgttgacttttgaaccaccagcaagaatgattttcttggtttcaagcaattcagaaccatttaccaagacgttcttgtctttagtgattgtaccaattcctttatgaacagtaactccgtagctacgaagaagtcctgcaacaccaccaacaagagtattaacaactttagatttagtttctaaaagtttttccatatcaacagtgaagttaggattttcaatcacgataccacgatttgcagcatgaccgatattttcaataatttcagcgttatgaaggtaggtcttggttggaatacatccacggtttaagcaggttccaccaagttcagatttctcaacaagggcaaccttaccgccgaattgggcagctttaatggctgcaacataaccagcaggacctccaccaatcacaacgatatcaaaagcatcatcgctcttaccatcatcgtttgaggtacttgctacaggtacagggctagcttctggcgatgctgctccagctgttgggatgttttccctttcttcaccaaggtaaccgataacttccgttacagggacagtttcaccatctcctttgagaatggcaatcaagtacccatcttcttcggcttccaattccatgctgactttatcagtcatgatttccaaaaggatttctccttcttttacaaattctccgacttttttattccattggacgatttgtccttctgtcatatccacgccggcttttggcataattacttctaaggccatgtcttccttcctttatctatatcttaaaaatgaatactcttgctcttaaattaacattgagattggcgtttcaatcaactctttcaagtccttcataaacttagcaccagccataccatctacgacacggtggtcaatggttaatcctaaactcatgattgggcgaatcacaatttcaccattgacgacaactggcttctcgattgtcgaactgacaccaaggatagctgagttgggttggttaataatcggaccaaaggactgaacaccaaacattcccaaattactgattgtgaatgttgaattttgtaactcacttggagccaatttaccatccaaggtacggccaataacatccttaaaggctacaaccagttctgaaagactcatcttctcagcattgtaaacaacaggtgtcatcaatccattatccatcccaactgccatggcaagattgacatagttgtgagtgataatagtcttgccatcttctgtcaatgaagcgttgatgtatgggtgtttcataagagtcttaacaactgcaagcgaaagaaggtctgttacagtagtcttcttcccagttgcttccatgattggctcaagaaccttcttacgaagagccaacatttcagtcatatcaacttcatagttgagggtgaaggttggcgcagtcaagtaagattcaaccatgcgttgggcaataaccttacgcattggtgtcattggaatacgctcgattttaccatatggtgttacgttatcagggacttcttccactttttcaatctgagcaggagatttgatgctatcgttttcgatattttcaggaagcagggccaaaacatccttcttcatgattttaccacgatgaccggttccttggatttcctgccaagcaatgttatgttcgagggcaattcgttttgcaagtggcgaaatgcgaaccacgtttgtgtctttataagtttccacgtcttctttgtggacacgaccgtttgcacctgagccagaaacgtcgtagaggtttatccctaaatcatccgctaactttctagctgcaggagtcgctcttagcttgtcatcagccatgacctctccaattctatttatgatacaaagggcgtcaaaagcgactgaaaaataggaaatcgacgatggcttcgatgaagccaaggagatttatcttttttccgatcttttagcccgtgctctaatctaagatattaatgacgaagagctctgcacctaaaagatacaaagtttctcgtcagctttattttatttacataacttatcttatgtaaccctattctttgttataagtttttcggattgcatctttgatactttcaactgttggaatcattgcattttctaggttttgtgcataaggcatcggcacatcttctcctgcacaacggcgaattggtgcatctagatagtcaaatgcttctgattctgaaataatagctgaaatttcaccgatatagccacttgttttgtgggcatcgttgaccagaacaaccttaccagtcttcttcactgagtttatgatgatatccttatcaagcggaacaagggtacgtgggtcaacaatttcaactgaaattccttcttctgctaattcttcagcagcttgaaccacacggcgaagcatttttccataagtaacaactgttacatccgttccttggcgtttgatttcaccaaccccaagtggaattgtgtagtctggatcaactggcacttcccctttttggttaaattctgacttgtactcaagtataataactgggttgttatcacggatagaagacttaagcaggcctttcatgtccgcaggtgttccaggtgccacaaccttaagtcctggaatgtgagtaaaccaagactctagagattgtgagtgctgggcggcagagccaactccgttaccagctgcacaacgaacagtcattggaacctgacctttaccaccaaacatgtaacgtgttttagcagcttggttgacgatattgtccatggcaataacagagaagtccatgaaggtcatatcgacgattggacgaagtcctgtcatggctgctcctgctgctgctccagagatggcagcttcagaaatcggacagtcacggacacgttctggaccaaattcttcaagcattccaacagaagtaccgaagtctcctccgaagacaccgacgtcttctcccatcaagaacacattttcatcgcgacgcatttcctcagacatagcaaggataatggtgtcacggaaggacattgtttttgtttccattttatctctttctccttagtctgcgtaaatatcttcaaaggctgattcaagcggtgggaatgggctttcctctgcaaatttaacagaagcttctactgcttcctttacttgcgcttggatttcttccaattcttcggcacttgcaatgttattttcaataaggtaattgcggaggttttcgattggatctttttgtttccacaattccacttcttcacgcgtacgatatttaccagggtcagatgatgagtgaccgagccagcgataagttacactttcaatcaagactggaccattgccactgcgaacatggtccacagctttctgaaatccttcatagacatcgatgacattgttaccgtcttcgatgaacattccaggaattccataagcggcgctacgttgatggatatgttctatattggtcattttcttgatatccgcagagataccgtaaccgttgttaatgcaatagaaaatgactggcaggttccagatagaagccatgttcactgcttcgtggaaaacaccttcattggtcgcaccatctccaaagaagcagacaacgattttaccggtattttgcatttgctgactgagggctgcaccgacagcgatccccataccaccacctacgataccattggcaccaaggttcccagcatcaaggtcagcgatatgcatagatccacctttccctttacaggttccagtgtatttaccaaggatttcagccatcattccgttgaggtcaatccctttagcaatagcttgcccgtgtccacggtggtttgaggtaatcagatcatctggattgagagctaacatagcccccacgttagctgcctcttcaccaacagaaaagtgcgtcattcctggcactttccctttctttactaattgtgcaatttttaagtccatgcgacggatttcttccatcttacggaacatttctagcaaaagatttttatctaaagttgacatcttcttgcctttctaactttcttcttaccttactattttaccgcttttggcaaatactgtcaaagtttttctaaaagaaatttcacaaaataaaaaagaaaaccccgtgaaaacaagggattttcttgtcaagaatattttttcacaaactttttagcatttggattttgctaaagattcaaatctcttcataatcacagttaaacgccaacggtagagcgccccgctcacaatcaaactaataatcaagccgatccagtaagaataagctccaaaatctgttagggaatcaaatagcgtacgcacagggattgctacgccccaataaccaagcaaaccaaggtaaaaaggaataactgtatccttatacccccgcaaaattccctgaagcggcgccgcaaaggtatctgctaactggaagaaaagactataagttaaaaaacgcactgtcaaatcgataaattttgggtcgttaccataaagactggccacatttcccctaaaaatgtaaaggaaggttaaggtgaaggccgcaaaaatgagggcagtccatcttcctagaccaatataggttttcgcatcatcaaatcgcttggctcccacttcataggaaacgacaatagccatagccgatgagatactcataggaaaggcgtacataagacttgaaaagttcatagctgactggtgactagctataatcaagggcgaaaacttagccataatcaagccaaccactgaaaagatagccacttccgcgaagacagttcccccaataggcagacctaaacgaactccttccttaattttatccatattaagtggaattcgtttctcaaggtgtaaggctttgagcttctcctgtttaaataaaaccagaacagaaatcccaagcaagacccagtaggccaaggatgttcctaaaccagcaccagcccctcccagttctggaacaccaaaggcaccgtaaatcaagagatagttaaatccgctattgagagggagtaacaaaagcatgaggtacatggacagtttggtcaagcccagcgaatccagcaaggaacgaatgacgctaaagagcaacaaggggataatcccgatagataaaaaccaaagatagcgaaccgctactgccgctactgctgcttctaacccaatatgattcaagattattggtgccaagaaaagtaccatccccagcaagaccacagataggcccaaggccaaataaataaattggtaaaaatcagacgcaacttcttcctttttgcctcgaccaagatggtgaccaatgataggcaccaaggctgacacaatccctgttagaaatgtaaagaaaggattccagatactggttgccatagatacaccagccaagtccatagtgttgtattgacctgtcattgcagtatcaacaaaagaggcagaataattggcaaattggtagatcaggattgggaagaaaatttttaaaaataatactaacttctctcgtaaacactttgtcttatacatacttctctttctattctgatttatctaaaccaaagagtttcagaccatagtttttcaaacttagcggaggtttattagattttgaagtagtatgccaacacgcacatgtacgacaataatagcttctaactaaacctccgttatcatattgaaccgcatggtcagctttttctttagtttcatattgaattttggaacgattagctgcgggacagtaaattccactattagatttcgcttgtctctccctacgttttcgaaaataattcatattctaactcctatcaagcttgatagacgatttgtcccttacagatggtatatttaacctgcccttttaaggtttcaccgatgaatggtgaattagctgctttggaagcaaaatgggagtccacaaagcggtcagccttggcatcaaaaatagtgatatctgctggaccattctcagccaagtaacctgcttcaaagttgtaaagcttggctgggttgtatgtcattttttcaagtaattccatcaagctcaactcaccagcttctactaaataggtcaagctgagagacagggatgtttctaagccagtcataccagatggcgctttggtaatatcctcaacatttttttcatctacatgatgaggcgcgtggtcagtcgcaataactgtgatgacacctgatttgagaccttcgataacggcacgacggtctgattccaaacgaagcggtggattcatcttagcattgctaccttgtgttaaaagaagtgcttctgtcttagagaaatgctgtggcgctacttctgctgtgacttctgcacctaacccctgagcaaactccactactttaacactttcttccttagacaaatgctggatgtgaacatgggctttagttgcataggcaatcatgacatcacgcgccatcatagcgtactcagccaccccagtagcaccgcagatatggaaatgttctctagcaatattttcattaaagccaagaacaccgttcaaacctggatcttcctcatgaaggctgataaaggtattgagttttttggcttcctccatggcttccttgacaatcttactgctctcaagcggaataccgtcatcagagaaaccaaccgcaccagcttctaagagtgccttaaagtcagtcaagtttttaccattaaagtttttagtaatggtcgcaactgtcttgacattaatcttctctttggcagctgactggagaactgcttgcaaagtctccacgtctgaaatggttggactggtattagccatcatgacgacagtagtaaaaccacctgcagcggctgctagggcaccagtatgaatgtcttctttatgtgtttgaccaggttcacggaaatgaacatgaatatcgaccaagccaggagcaaccacaagaccagtagcatcaatcgtttctgctccttcttccgtgatctcagacgcaattttgataattttcccatcttgaactaagacatcacaaacttgatccaaaccagacttgggatccattacacgaccatttttgattagtagcatctgctttctcctttattcatagaaatcaacttgggtatccaacaatttatccccatcataaacaaacttggctgaaaagaagggtttatcctctaaaagccactcaacaaaggtgtggtcaccttcccaagtcggcttgctcaaaacctcatcatagggaacccattctagcgtcccctcattgcagtcaatcaagtcgccctcaaactccgtcaccttaaaaacataggtgtaccagtctaaatctggtgtaaattcaggaaaagtgatgacaccttttagaactggcttggctttgagccctgtttcttcaaggatttcacgcgccgcgcattcctggggcgtctctcctctctctagcttaccacccacaccaatccatttcccttcatggacatcattgggtttcttattacgatggagcatgagcagttctttcccattatcaatgtagcaaatcgtcgctaactgaggcatattttctccttatctaagccaatcgattggctcttgtcctgtctcttttaagaatgcattggccttggaaaagggcttggaaccccaaaatcctctataaaccgacaaaggacttggatgggctgattcgataatcaagtgatgaggattggtaactaatgccttcttcttacgtgcataagctccccagagtacaaaaacgactggtctatctagatgattgaccacctgaatcacagcatcagtaaaaggctcccagatttgaccagcatgaccattggcctgtccagcaggaacagtcaaacaagcattaagaagcaagactccttgctcagcccaagctgtcaaatcatgagatttcttaactccgatatcatctgacaattctttcaagatattttgcaaggatggtggagctgggatagagtcaggtacagaaaaactcaagccctgcgcttgacctggtccgtgataggggtcttgccctagaattaccaccttaacttcttcaagcagtgttgtcaagagagcctgaaaaaccttttccttgggtggataaataatcccctgagaatagacctgctccataaactgattgattttcccgaaataaccctcaggtaattgcgccttaatcaaagcatgccaagacgagtgttccatagccgactccttcatttttactgcctctattatagcaaaaagtggctatggaaaccactttttacagtttatctaaagatttaataaatcgactatatatacgatttgaatacgtgaatacagtttataaagactggctattttttataattactttttaaatcattaagcattttactacctctttcgaagattatcttttctgaaatatttttaaacatattaaaatccatctcagaaaaaggagtttctttagaaacttgccatatagtctttaaataatttttttctaaaaagtcgtcaaaattagaaaaaaatcgaaaatacaatgcattctcttggtgtaaaatcgctctttttaaaggataatactctttaatattattaactttttgttcgtaggcatattttgctacatgatctaggtatatatcaaaaaagtcatgaggaaaatctcccatacagccattacgattcatattgaggctatattttcgattagtaagataattcggaaatatatttcctattactctaagattatctacttgtgaatcccttctcccaatataatccccttctttgactaatgatggagatttccaagtaaaaattaaatcgccagagaaatttttcttatcaaaaaacttaaaaagagattgataaatactatttgctaattgacaagtgtcagatgtaaattcataattaacagcttcattaaaatcaacttcagacatttcaatgtactcttcaatagtaatattagcttttttgtagtcattagctcgtctcctttaaaatgtgatcttttcaagaatatttttatctaaacaatccagcaagtcttggtaagaatagacttcgtaagtcggctgggcttgtgtgtgattttcgaggtgatgaggattataccagatagtgtcaatccccgcattattgccaccttgaatgtcggcggttagagaatctccaatcatcagcgtcttttctttactaaatccagcaatttgctggccaatcttttcataaaaaagagcatccggcttttgagtttgcaactgttctgagataaagacttgattgaaataaggtgctagaccagattgagccaaacgtcctgtctgaatggcagtaatgccatttgtcgcagcatacaagttataatcacgctcaatgaggctgtccaagagatcatgagcgcccgatagtgtttgtccctgctgggcgaggtaaaattggtaacgctgggcaagaaaactaccgtctttttcctgtccaaaatgagcaaataaacgagaaaagcgcgtgttaaccagctcttgtttactgattttcttcagctccaagtctttccagagagccttgttcataggaacgtaataatctttataagcctgaatatccgcaactccttcttcttttagaagttgggtcaaagccacatcctcagcagcatcaaaatcaagaagagtgtggtcgaggtcgaagagtagaaatttgtagaacaatttgaggttttcctttctgaaaattcattaagaacattatatcataaagcacctcatacaattaactaatttaatcacttaaaaaaattcgaacactttctatacaactgacagctcaaatctttcagaatagaacaatactaactatcgaacaccccgtcttcataaatatatatatgtaattctagacctagaattcctataaactaaatgctttcatactcttccaagtaattgattgccttaaattttaatttttgaaggtttctaaagctagaatagccccatcacaatcagttttgattgattcacaatttagaaacactatagtttcactcctgttaaaataaaaaggaactgcataaagcaatccctttctgattttgaaatcatttacttaacattttatagttgagataatcaatagcttatctataaaaagagttatagtaaaattccttatttattgatttcaagctccgctaactgtgtttgaataactgacagttctgcaccagcctgaagaagagcagctgcattataggcaccttctacaattggaaccctgttgatgatgatacttttatcactgaaatcagtcaccatttttaagttcattttagcagaacctaggtcaaaaaaggcaagtaaagtatctgctggattttcggaaacaaccctatctacttgttcaaaactcgttccaattcctccgccctcggttcctcttacataagtaatcggaacatctttagctactttactaatcagttcaacaacaccttctgcaatgtgtttggaatgtgaaacgataacaagaccaatactttccatcaaaccaccccagtttctaaaatagcagtaaagagtaatcctgatgagaatgatccaggatcaatatgtccaagaaaccacatgctcctaagacaagagctaacagactggccatcaataatagtattgttctttttttcatcattactccttaactagtgtttaactgattaattagccagtaaatagtttatctttatttacactatctgttaagatatagtaaaatgaaataagaacaggacagtcaaatcgatttctaacaatgttttagaagtagaggtatactattctagtttcaatctactatattttgcacattttcatgaaaaaaatgagaactagaactcacattctgctctcatttttcgttttcccgttctcctatcctgtttttaggagttagaaaatgctgctacctttacttactctcctttaataaagccaatagtttttcagcttctgccataatagtattgttgtcctgggtgccaaatagtaaattattttttaatcctgtgagagtctctttggcattggacttgataattggatcctggatttttccaagtaaatcttcagcctctctcagtttttcttcaaccttttcagtctcgacctgaggttcttctgattcctctggtgattcttctggttcctctgttggttttggagactctggtttctcgctttgcggtttctcttctcgaggggtttcttcctcaggtttttctgtctgaggtttctcctcgcttggtttttccgtttgattggtatcagcttgaccatttttgtttctttgaacatggtcgctagcgttaccaaaaccattatctgaatgcggacgttcgtttggatgttcgacatagtacttgacagtcgccaaaagatcctcaagagtataccccttaggtgcctcataaaggccttcgtcaaaccactcaaatttgatgttatggtaatggtcataatgaggtatgattaaactaccgtttttgacttctacagtatattgaagattgtaaggcatacgatcaagtggcaccttcttagctgctttcacgcggttgtagatagcttctgctccttttgcctcagtatttcctgaatcctgatggtctgtcgaaggaggggtcaaacctttctctttagcataagcctgggctgccgctctctcagcttcagacaaactatcttttttaatccagtggctatgggtcatatgtggagttacataggcatccccctcatcactggttatatcacgaggatcaaagatataaccgtcttctgttgtgtacttgcctgccaacttggctacttgaatctcatcatcagtgtaggtaatttgcgcatttggttttcctaaacgttctggatgacgaatcggagctaagaaggcaagaatatcttccactaacttgactttatcacttgagacatccttgagtcgttccaacaggttatccaaagcctcaaaatcaacttgtcgacctttattatcaagtaaatcttggtgaattcttgctagtaagtcataagccttattgtaaaattctcgatcactagatgggaggtcagttttcttagttcctagcttatgagataaactttcctgcttggccagtttgctatcaatgcctgctgctgtttctgctgaaagatccttggctgggatataacgagaaactccattctcctcaaagacataaccatcgcctacttttcgaacagcttctttgaccaatttctcatcaattggattgcttggagctggttgcggacttggactaggttctggagtcggttgtggacttggttcttctggtcttgaatctggtacccaatggtttgaacgataacgaaggggaataatacgagcaattcgtttttccaattcagacatttgttcataagggataaagtggtaatggttaccatgagggacagctacacctctggcggttcgacttgtgatttgcgctgggtcgaaaataaggccatcagattccacatggcgttctgataagggtttagcatacaattcacgtaaaaggcttgaaatgttttccccttgattttgatgataagttggagtgacagtcagattgtggttctctgacaatcttggttgagctggatttgcattataactagaacttgaagaaggacgagatccctgcttcccattccaataggcttctgcagcagctaactcgctagctgataactcattcttaggaatgtaatggtaatggtcgccgtgaggaacgatataagcatcacccgtgtcctcaatgatatcagatgcattgaagatatacccatcatccgttgtataacgtccttgggctctggctgcagcaacagcattatctgctcttgagttatgattatgactgcgttcctgcttctgacgtttaatctcttcttttgtccgaatattatccgcatgagctgcatccttaaggtaaacatagtatttaccgtttaccttaatgacataaccacccttgatttcattgacaatgtctgaatccttcaactgataattcggatctttcatgaggagctcttcactgatgatggcatcataaggaaccttgccattatagtaatgataatggtctccatgagaggtcacataaccttgatccgtaatcttgataacaatttgttcggcgttgatcccctccctcttactgacttcatctggtgtcaagttttctgccttttgaccagcctgatcaccatctatataagcaactcgattagactctttcttatcctgaccagcttggtaacgtccaagctcataggaacaaacacttagggcaaggactgccactgaacctgctagatattttttattaattttcattctttcctcttttcttaagtatatttgattcactataaagtaataaaccggttaattaactagttaatagtttactctttttaatattgcttgtcaagaattttacatatatacataataaaaatgaaagcctctttatcgagactttcatttttcattagtttattttttccttacttacagatgaaggattacttccttttaacaacgcaagtaatttttctgcttctgccatgatactattgttatccataatttgaagagtcaaattatttcgtaaaccagctagagtttctgttgcattggctttcagactagaatccgttactttcgcaagcaaaacttctgcttctttgagttgggcttctactttttcagtctctacttgagggacttctggctcagcaggtgtttcctctactggctcttcatccgctttgaagttcttatttggatcttcactgtggtctttcttgcctaacacatgctcactggcattgccccatccatcattagaatgtggacgttcgtcagggtgttctacgtagtacttaatcgtcgcaaacaaatcttccaaggtatagccatttggagctttgtatgtgtgatcatcaaaccaagcaaatttaatattatggtaatgatccttatgaggaataatcaaattaccgtttttaacctcaactgtatgctcaaccatatatggaagtcgaacgagtggaattcgtttttcccctttcacacgattgtaaatagctgctgcactatctccagttggatttgctttaacatctgcgtctggagatggaggtaggatacctttttctttagtataggcttgagctgcaactttttccttatcagaaaggctatcttttccaatccagtgactatggcccatatgaggcgttacatatgcatctccttcatcactgattatatcatgttcatcaaaaatgtaaccatctgacgttgtatacttatcagctaattgagcaatacgaacttcgtcttcagtatactcaatttgagaatttggtttgccaagtcgctctggatgggtaattggtgctaggaatgccaataaatcatctaccaatttttctttattagtcgattcatcattcaagcgttctaataatttgtctaaggcttggaaatcagaattacgacccttattttcaaacaaggctttatgagcctcagttaacagattatatgctttatcataaaattcttggtcacgaggagcaacattttcttttttagcagttaaagtgtgtgaaacactctcttgttttgataacttgctttcaagatttttaacagtttcagatggtaaatctttcgcaaagacataacgagagatgcccttttcttcgaatacatatccttccccaacttttcgtaccagctgactaaccaaagaagaatttgagtctattttaagatttggtgcaggttgcgggcctggactaggttccggagtcggttgtggacttggttgttctggccttgaatctggtacccaatggtttgaacgataacgaaggggaataatacgagcgattcgttcttccaattcagacatttgagagtaagggatgaagtggtaatgatctccgtgtggcactgcaacacctctagctgttcgacttgtgatttgtgctggatcaaagacaaggccatcagattctacatgtcgttgactcaaaggcagtttgtagagctgtttcaagagactatcaatgtcattactttgacttgcttgactgttagtgttgctgttgttgcttgtgttagtatttgtagttcctggattgcttacagaaggtacccagtttgttcttgaagtgttatcgctattttgtcggcgataggttcttgaatttgacagatttcctcgaccagataggaaggcttctgcagcagccaactcgctagctgataactcattcttaggaatgtaatggtaatgatctccatgaggaacgatataagcatcaccagtatcctctatgatatcagaagcattaaagatataaccatcatctgtagtatagcgtccttgcgaacgtgccaaggcaacagcaccatcgtttcttggagttccaccttcacgatgttgactatgctcttgtttttgtcgattgatttcctcttttgtacggacgttatccgcgtgggcagcatccttaaggtaaacatagtattttccatctaccttgataacatatccacccttgacctcattaacaatatcctcatcttttagcttatagtttggatctttcatgagtaattcttcactgatgatagcgtcataaggaaccttaccattgtaataatgatagtggtcgccatgtgaagtgacatagccttggtctgttatcttgatgacgatttgctcagcattgattccttcacgcttgctaacctcatcaggagtcaaattctccgttttttgcgtcgcttgttttccatctatataggaaacacgattattttccttaaccgttctagcttgatacagtcccaactcgtaagaacaaacacttaaaatcaaagtgccgcagaaccaacaaggtatttcttattaattttcatcgaaactctctttctatttgatatttctagttgcaattcatttctaaattgcagaaactcctctctattacttaactggttaatagtttactcctaaatatccaacttgtcaagaattttatgaaccatttaagtattttttgttctgaccactactttttcaaggttggactttctataagaaagattttcttgaaaattctttttaaaatatcaaaaaaatccctgtaactgagttgcagggacttttcgattaatcaaaattaacgtattctttttgaagttcaagaacttcttccattgttgagcattctgtaagggcacggtttgcgtactcttccatcttagctgtgtcgagtttcttcatcaagctgcgtgtacgaagtacagatgttgctgacatagagaactcatccaagcccattccgacaagaagtggaacagcttgttggtcaccagccatctcaccacacataccagcccatttaccttcagcgtgagctgctttgatcacattgttaatcaagcgtaggattgatgggttgtatggttggtaaaggtatgaaacttgttcgttcatacggtctgctgccattgtatattggatcaagtcgtttgtaccaattgagaagaagtcaacttctttagcaaattggtctgcaagcatagccgctgcaggaatctcgatcatgataccaacttggatgttatccgcaactgcaacaccttcagcaagaaggtttgctttttcttcatcaaagactgctttcgctgcacggaattctttcaagagcgcaaccattgggaacatgatacgcaattgaccgtgaacagacgcacgaagaagagcacggatttgtgtgcggaacatagcatctccagtctcagagatagagatacgaagagcacggaatccaaggaatgggttcatttcgtgaggcatatcgaagtaaggaagttccttatctccaccgatatccattgtacgaacgacaacaggtttaccgttcattccttcaagaacagccttgtatgcttcatactgctcatcttcagttgggaagtcttgagaatccatgtacaagaactctgtacggtaaagtccaacagcttctgcaccgttgttgttaacaccttcaacgtcttttggagtaccgatattagcagccaactcgaagtgtttaccgtcagcagtcactgtttgagcatctttcaaaagtgcccattcagctttttgtttcgcataggcttcaccagctgctttaaattctgccgcttgttcatctgttgggttgataatcacttctccagtgatcccgttaacagcaaggatgtcaccgtctttaacgatttcagtgatgttatttgtacctaatacagcagcaatttcaagtgtacgtgccatgatagctgagtggcttgtacgtccaccaatgttggttacaaaagcttttacaaagtttttgtccaattgagctgtatctgaaggagtcaagtcatgcgcaatcacaatcacttcttcattgatagaagctgggtttggcaattttttaccaagaaggtttgccaatacacgttttgtcacgtcgcggatatcgctgcgcgttcttgcatgtatgggttgtcttccatgccttcaaagatagtgataaacatatctgtaacttctttcagacctgcttctgcattcactttcttcgcacggatagtttccttgatttggctgatcatttctgggtcagcaagaaccattaagtgagcatcaaaaacttgagctgcttcttcaccgagcgtacctactgctttctcgcgaataacagaaagctcgtcttgtgatgcctgtagagcggcatcaaggcgagcttcttctgcgtttgtatcttcgactgtaatagtctcaaatgacaaatccggctgaacgagtagatatgcttttgcaactgcaacaccgtcagatgctgcgattcctttaagcatttctgtcatttcccttatgccaatccttctttttccattgtttctgagattgcagcgatagcgtcatctgcatctgcaccttcagctgagatagttacgtcagcaccttggccaacaccaagactcataacacccataattgatttaaggttaactgatttacctttgtactcaagagtgatatctgaagcaaatttgctagcagtttgtaccaacaatgttgctggacgtgcgtgaatacctgtttctgccactacgtggaaatctttagaagccatagtttgactctccttttgttctttctttttttgagttatatgtgataacccttacaatttagtattataccatcttctaggatttttttcaagcattttctggattttccttcaatttcctttcagataacttgctgaaaatcttctatcctagataacaaaacacaggatatagtttctttaaaaacaatttataggataatcattgctatttcacaatacaaacactatatattgtgtttatatataaaaacaacaaaagaacaccactatatttagttcaaatcattgacaaaattttattttctgatatactaagatagtattaaattttgaagaggagttacacaatggtaaccgtttattctaaaaacaattgtgtccaatgtaaaatgaccaagcgtttcttggacagtaataatgtctcttatcgtgaaatcaatcttgatgagcaacctgagtacgtcgatcaagttaaagagctcggttttagcgcagctcctgttatccaaacaccaactgaagtcttttcaggtttccaaccaggaaaactgaaacaattagcataatcttagtacatcatccagaagaaactgcttttagggctaacttagaagcctttcttttgtaattagataagggaaattttatgggattaaaacatcttgaagacgtgacttacttccgtcttaataacgaaattaaccgtcctgttaatggacaaatcatgcttcataaagacaaggaagccttggatgctttctttaaagaaaatgtagttccaaacactatggtttttgattcaatcaaagacaaaatcaattacctcattgaacacaactacatcgaaacagcctttatcaagaaataccgtccagagttcttggaagaattagctcaatttatcaaagaccaaaacttccaattcaagtcattcatggcagcttataaattttacaatcaatatgccttaaagactaatgacggtgaatactatcttgaaaatatggaagaccgtgtcttcttcaatgccctttatttcgctgatgggaatgaagctgttgcaatcgatattgccaatgaaatcatccaccaacgctaccaacctgctactccttccttcttgaatgctggacgtgctcgtcgtggggagttggtatcttgtttcctaatccaagtgacggatgatatgaactctatcgggcgttctatcaactcagctcttcaactttcacgtattggtggtggtgtgggaattaccctcagcaaccttcgtgaagctggtgcacctatcaaaggctatgaaggagctgcttcaggtgtcgttcctgttatgaagctttttgaagacagcttctcttactccaaccaattggggcaacgtcaaggtgctggtgttgtctacctcaacgtctttcacccagatatcatcgctttcctttcaactaagaaagaaaacgctgatgaaaaagtacgtgtcaagactctatcacttggtgttgtagtacctgataaattctacgaattggctcgtaaaaatgaagaaatgtacctcttcagcccttactctgtagaaaaagaatacggtgtgccattcaattacatcgacattactgaaaaatacgatgaattggtcgcaaatccaaatattcgcaagacaaaaatcaaggcgcgggatttggaaactgaaatctctaaattgcaacaagagtctggctatccttatgtagtcaacatcgatacggctaaccgtgcaaatcctgttgatggaaagattatcatgagtaacttgtgttctgagattcttcaagttcaagaaccaagcttgatcaacgatgctcaagaattccttcaaatgggaacagatgtttcatgtaacctgggttcaaccaacgtggttaacatgatgacttcacctgattttggtcgttctatccgtgctatggttcgtgcccttactttcgttacagatagttcacatatcgtagctgtaccaacgattgaccatggaaatagccaagcccacacctttggtctcggtgccatgggactgcacagctaccttgcccaacaactcattgaatatggttcacctgagtctgttgaatttacaagcatctactttatgcttatgaactactggaccttggtagagtcaaacaatattgcacgtgaacgtggtattaccttccacaactttgaaaaatcagactatgctaacggaagttactttgacaagtatgtaactggtgaatttgttccaacatcagaccgtgttaaagaactcttcaaaaatgtctttatccctggtgttgctgattgggctgaacttcgcgacaaggttcaagaagatggtctttaccaccaaaatcgccttgctgtagcgccaaatggttctatcagctatatcaacgacgtttctgcttctatccacccgattacgcaacgtatcgaagaacgccaagagaagaaaattggtaaaatctattaccctgctgctggcttgtctacagaaaccattccttactacacttctgcctacgatatggatatgcgtaaagtcatcgatgtttacgctgctgcgactgaacacgtggatcaaggactttcactcaccctcttcatgcgcagtgacattccaaaaggcctttacgaatggaagagggaaaataaacaaacgacacgtgacttgtccatccttcgtaactatgcctttaacaagggaatcaagtctatctactacgtccgtacctttacagatgacggtggagaagtcggcgccaaccaatgtgaaagctgtgtgatttagtttctagcatagaaacactatttttccctaagcagcactgataaaatcaaatctactatgtcataacataatttatgtaacattttaaaagtcgggcttccgactttttgtgcgatactcctatagaattatggtaaagtagaaataattgtgagttcgcaatactaaacacagaaagagattttaaatggaaacttactacaaagccattaactggaatgccatcgaagatgtcatcgacaaatcaacttgggaaaaactgacggagcaattttggctcgatacacgtattcccttatcaaacgacttggatgactggagaaagctatctaacaaagagaaagacttggtcggaaaagtttttggtggtttaacccttcttgacactatgcaatctgaaactggggttcaagcccttcgcgcagacatccgtacaccacatgaggaagctgtcttcaataacatccaatttatggaatctgtccacgctaaatcttactcatcaatcttttctaccttgaatactaaggctgagattgaagaaattttcgaatggaccaataccaatccttacctacaaaagaaggctgagattgtcaacgaaatctacctaaacggcagcccacttgaaaagaaagttgccagcgtcttcctcgaaaccttcctcttctactctggtttcttcactcccctctactatctcggtaacaacaaacttgccaacgttgcagaaatcattaaattgattattcgtgacgagtctgttcacggaacctacattggttacaaattccaacttggtttcaatgaattacctgaagaagagcaagaaaaactcaaagaatggatgtacgacctactctatactctttatgaaaatgaagaaggctacacagagagtctttatgacggtgttggttggactgaagaggttaaaaccttccttcgctacaatgccaataaagctctcatgaacatgggacaagatccacttttcccagattcagctgaagatgtcaacccaatcgttatgaacggtatttcaacaggaacttccaaccatgacttcttctctcaagtcggaaatggttaccttcttggcgaagttgaagccatgcaagatgatgactacaactacggtttgcactaatactcttcgaaaatcaaattcaaaccacgtcagcttcgccttgccgtactcaagtacagcctgcggctagcttcctagtttgctctttgattttcattgagtataattctccaccactcttaaccatcaaaaagtaaactagaaacaacaaaataataacttaataaaaatatcgaaagttttgaaaataaacctcgatatttttgtttttgttttattttgttgtttttgtatttgaatgatgagctagtttatggtaagatagtagtaggaaacgaggtgataatatgctcaaacaagaaaaattaaccaaaattttagagatagtaaatagtaaaggaaccataacagttaaacagattatggacgaaatagccgtttcagatatgactgcaaggcgctatttacaggaattagctgataaagatttgctgattcgtgtgcatggtggagctgaaaaacttcgaaccaactcccttttgactaatgagcgatcaaatattgaaaaacaagccctccaaacggcagaaaaacaagaaatagcccattttgcaggcagtctagtagaagaaagagaaactattttcattggaccaggaacaacattagagttttttgcgcgtgagttgcctattgacaatatccgcgtcgtaaccaacagtctacctgtttttctgattttaagcgaacgaaaattaacagatttgattttaataggtggaaattatcgcgatattacaggtgcttttgttggtacattgaccctacaaaatctctctaatctccaattttctaaagctttcgttagctgtaatggtattcaaaacggagctctagctacttttagcgaggaagagggagaggctcaacgcatcgctttaaataattctaataaaaaatatttactcgcagatcatagcaagttcaataagtttgatttttatactttttataatgtatcaaatcttgatactattgtttcagattctaaactaagtgattcaatcctttttaagctatctaaacacattaaagtcatcaagccttaataaactgaaagagcctgggtaacaactcaatttcagaagaaaaaaagtaaatcttcccacaataaaacgcatagtatcaggtgttgaaacacctgatactatgcgtttttctatatcaaagactttttgcccaattcctcaaagctatgcattgagaaatctgcgactcgcttcctagtttaaagttgctctttgattttcattgagtataagcaacgtgattagataagagttttacagagtactaaatataagatttaacttttttgagaaattggttacgattgttgaaacggcataaaatctgaatcaaaggagatagtatcccattcttcaggattgataaaatttaaaaatagatttttaaattcttccagctcatcatctgaatgacaaatccattctttaccagtcgagacataccattttccaagacttttcaattcttcactcgtcaaacacggtatttgagagcatttttcgaaatttataatataaactttttttcataaatagattggataaaatctttgaacatctttttgactcactaaaattctatatctaatgactaattctactagtctataatctgagtttccgctactttcttgtaccagtgagctgatttcttaggataacgttcttgagtttcaaaatctacgtagaagagaccataacgtttctcataaccgtttgaccatgagaagacatccattaatgaccaaatgaagtaaccttttacattagctccatctgcaatcgcatcagataaaacctccaagtgttgcttcacgtaatcaatacgaccatcatcgtaaacagtgttatcaacgaactcatctttatagccgagaccattttcagtgatgtaaatcttcttgtagttaggataatctttcttcacacgcatgatttggtcatacaaaccttgagggtagataatccaatcccaatccgtgcgtggtacatagtcaggagctacacgacgaccaacacctttgatttgatacttagagcttcctttttcacctttaccattatggataatttcagtttctccatcaaaggcttccatccagtcactcatatagtagttgattcctaggaaatcattcaagtcttttgcagcttctaatgctgtaaaatcttcttcacgaagatccaaactaccaccattgactaataagatatggttgacaccttccatggtttcagctgaatagcgacctagataagttgcgtctaagatgaatttattgtggatgatatcttccaactcagctgcacgaacatctgctggattttcaggatctagaggatatttagttggcagggcgtgaacaacaccaatttcccctttatagcctttctctttgtacaattttaccgcgcgtgcatgagacaccatcatattgtggtgtgattgaaagactttggcaaggtcgtactggatacctggagggaatttcccaaccaaatattgaccatcaccgattggtccaatttcattaaaggttgtccaatagtttacttctggaaattcttcaaaacagaaggcagcgtagtctacaaaatgttcgatattttcacggtttaagaagtctccatttgagtggagagcttctggcgtgtcaaagtgatgaagagttacaaaaggctcaacatgacgtttgtgacactctgcaaataaattatgataaaactcaacacctttagcatttacttggccgtaaccagtcgggaaaatacgtgaccaagcaatagaaattcgaataccattgacaccatactcttctgctagcttgaggtcaactggatatcgattgtaaaaatcactagctggttcggcagtgtaccagtagttatcctcaagatatttatcccaagcaactggtccttttccatcagtatgtgtagcaccttctgcttgataagcagctgttgcgccaccaaaaataaagtcttttggaagtgtttttgtcatttttttcacctatttcttgatttaaataaagtaaaagtgagaggagaggagtcagtgagccatccttctccatctcacttcttgtaccaagtcaccgaattgtgacatgaggaggtaaaaacgatatctttttaccgacgaattaataataggaaattcgccatagcgatttccgtaacgatgggagactatttcagagtctctagccttaatcgaattgcgcttgtacgaatgcaagagcaccttttccatcacgagttaatttgatgtattgagcgccttctgttttcgctagtttaataccgagcttatctgtttctgctttcatatcttcaaagtttgaagcaacttgaggggcaaggataacaagatcaaactctggtaacatttcacggtgagcaccatagccgcctgctgctgctttcacagggacattgtattctgctgctgccttattcaaagcatttgcaaggagaccacttgttcctccacctgcacagagaacgaggacatttgtttcttcagtgatggtattttgtgctgcatcgacacccgctttttcaagaatagcatccgcttttgcagtgttgaagtttgcagcaactttttctttcaattcatcattagacttacctgaacgttcttcttcaagaatttgttcatcatagaccttaaggaatggatagtaaatgacaacgtcaaccacgattagaagggcagcaagaatgaatgatagcacttggaagttagttccaagaactagacctagtggagctggagttgtccatggtagattagcagtgaatgagttcattccaagagtttcaataaagaatttgaaaatccatacgtttgcaattggagcaaagataaatggaatgaagaagattggattcaaaacaagaggtgcaccaaacaagattggttcatttacaccgaagaaggtaggaactactgaagcacgtccgattgcacggttacgtttcgattttgtcaaccacatgaacataaatggaacgaccaatgtcgcacctgtaccacccatggtaacgataaacatttgtgtaccagaagtaagaatcttgtctgcatgcatcccttgttggagaaggttcaagttaacttcggcattggcataggtaatagctgcgatagctggttcaacgatagatggaccatgaatcccaacaaaccagaagaaggcaaaggcaccaaagataatggtaataccaaggtatccgtctgctgctgagaagagtggtgcgaagaatttaccgattgattctgccacactagaaccaacaaaataacgtgctaataagtcaagagcataaagagaaacaacagatagagtgaatggaatcacatctttaaagacttgtgagatatttggtggaacttcgtcaggcatacgaatagtgacgttgttcttaacacaaaccttatagatggctacagtaacaaaggcagcaaggaaggctgaaagcaaaccttttgtccccaagaatccagtagctagaccactttcgataggatcagctgccaacatcaacaaaccaacaattgctgccaacaatgttgacatatacttgatttgattggttttttccatgctccggtttactgagtcagtcaatgacttagctgttgtaccagctaccaagagagccagaatacccatagaatagctataaggtttcatcagaaaggctacaacttcatcagaccatttaaagccccatgagtttggtacaaaggcaatcaagataaagatacttgagaagagaataacaggcatacctgcaatgaaaccatcacgaatagcacgaagatagatattacgagatagtttttcaaagaaaggctttcctttctcgataaatgcaattagtttattcattattgaactcctctcttgtagagttcaattaaatgatgcatcaaatcttttaacaagatagttgtcattaagtggtcttggccatgcatcatggttacactataagccaagtcctcacctgaagcttccttagtcaatagacttgtttgcgcgtggtgagcctctgcaatacagctaccagcttcctctaccagagcgtccgctttttcaaaatcaccagcttcagcagccttcaaggcttccaatagttttgaacgagcatcgccagcataggctacgatttcaaaacctaacaatgttacttcttctctattcatgatagaattctccttatatagttttaaataaatttttatgacaataaacgttggatatgtagaactagataaactcgttcacttttatacaaatcaagacccgtatgttgcgtaatcacatcatagatcttggaaccaatctcgaaggcttttggataggattgtttaatatgatcttccatatccagaagtgattggttatcatctctagatctgtctaaataatccaagaaataattcaaatggatcataaagcgatcatagaaatggttattctttttagttcgttgaattgcatagtccgttaaaacttcttcaacattcctgagaatttctttcctcttatcaatcgactccacaagttccacttcattttcaccttcagcattaatgaaatgataagcaatccgaataatttcgtcctcaggaaaatgatctgctagcttctgacggtaaatttcaaaagcttcatttgcgatttgaaaagcgacaggatacttagcggaaatatctggcagattactatccttgtaccttccttgagttagagcttgataagaacagtaaatatgatctgtcaaggttacatagagatactcttgaatcggataatgatatttctttgatagcttatcaatgatttcataggtcactgtgataaaatcaagcggaacatctttgagaagagccataaagttttctctggactcttcggtcttcatccgaaagattttctcaacctgattttcagcaatcaaatcccccttcttctttccgaatgcaattcccttaccaattacaatcacctcttctcccttatcatttctgacaagcgagacattgtgattcattggatttagaattcgatacatgtcaacctccttttatatcttaaaggtatataagtacaaaaaatgaccacaaatgaactagaaaatcagctgatttctaattcacctgtgatcatgcctaatattacttagtaacactcaccttgtattaacttgtgatttaagtatagcacaagtaagttattttgtaaacctttacatacaactttttttaaaacttaactatgttctaaaattcatcaaacagaggctctgtttttatttatttttgtaaatcaaaacaaaaacaggaagacagaaaaataaaaaagtagctacatttttaaaattcattaagtctaataaacaaagaacacaagaaactataaaacaaaatacagttatttttttaaaagaatgattcataaagaaataacctctaaggtaaatctatggtgtaaacaaggttcacaaacggcacttctactgtagctacagcaactgtccaataattttctacagcagtttttacagcccagccaatcgcaccacttattacagcaacaaatccagatgtaacaggattaaccgcaaattgtttcaaatgccatccagcatatccagtagcgaaagctccagcagcccagccacccatccccctcacttgaggaccaagattgaaacgaaaacctacaggacctctttcgtaaacgttgggtaactcttttacagctccatacatcaaacttgcttcttgtacagaaataccaatattttttgctaactcttcaggagtgccttttaaatttatatttccaaatttatctacataaaaataatcttccaaaatttgaccagcatttacaatatcttctgaaaccgaaacattataaaatttattcccatcaacattcaaaacaatatcatttgctttatctactgtagttagggcactatctgcaaatacagaaccactaaccataggtaaggctgataagaatattgaaacaatacctagtcctacaactaacgctttaaaactctttttagtagccgtttatcttctccttttataaaacaatgaatgaaatgtgcatctaaatatagtttattctggcaatattgtttccgtatttttccttcctagctcgtaaaataaactatatcctatttttattatacttcatatagttactttctaattcatattaacttgtgatttaagtatagcacaagtaagttattttgtaagcctttacatacaactttttttaaatttttttagattcatgttcctaaactaggaggactttcttacacgcgttctttccatgaagttgctgttctttgaagaactttgttgagttcgtcaatgttttcaaatccagttgtgcgaacgcattcgcgagctgctgcttcaccatctttgatgtaagcttcaactgatcctgcccatgtagcacggccacaaagaactccgttaaagttcgcacctgattcatgagcaaatacaagagtatcttggaagagtttagctgatacaccagcactcaagtagatgtatggcaagttcgttgcttcatcttgcgctttgaagaaggctgctgcttcttcacgtgtataaactacttcaccttcagcgaagccttcaacatatttaatgttaacaggaacttcaactttcaaaacatcaatgttaaagcgtgggtctgaaaagactttcatagcgccgataactttgtgtggttttactttagcgtattctacagaacctgcatccgcaattttttcatcgtaagcaaggatttcaaggaagaatgggatatcttcagccacacactcagaaccgatgcgttcgatgtaggcttgtttttcttgattgagttcgtctgagctatctacatcatagtaaagcaagaatttaactgcatctgcaccttcttctttaatacgttttgcagaccaaacatccaagcagtctggcaagcgttttgtgcttgttgtgtcataacctgttttttcataagcaaggagaagaccagctttttcatcaagagctttagttgctggaagtccatactcagggtcaagaagcatagatgaagcatatttagtcaattcatctgctaccaagactttaagttcttccatttgggccacagttggttcttctgtttggtgtttaaccatgaggcgtttcaaagcaccacgttggtcaaatgcaagagctgagatgataccattttcatcagaaagtttttctaagcgtacacgtttttgttctgttaaagccattttatacctcttttactattaattgatcatatagagcttgatagttggccatgttgacatgaccagtcattttttcttgagcattgagcataccaaggacatttgccttgatgagtaattctgcatccgattctttgtgaagaagtcctgaagaaattcctgccacagtagagtctccagatccaacaggatttaccacctgaattctaggaatatctaccttgtagaaagtgtcaccatgtttggcaaaagtaccgttggcaccaagtgaaacgataatccattcaatccctgcaaacaaaggttcttgaagtacttcttttaattcatccaaatcctcagaaacttctcttccaagaagctgagacaattcttcattatttggtttgatgactgttggtttatggggtgattcaagaacagcctgaagtgctgcacctgagcagtccaagactacatgcttgccagcttgattagcaagttctaccaagctcgcatagtaatcaactggaaggccagctggcagactacctgagatggctactacttcaactgactccaagagttttttgaaatgttccaaaaactcttgaccttcctgttccaatacttcaggacctttttcaagaacttctgtttggttgtctccgtggagaatagcgatacagttacgagtttctcccttaattgagaagaaatctttctttacttgattatcgatatgttcaaccaaaaactcaccaagtttgccacccactaaaccagtagcaagaacagaatcgccaaattctgaaagtactcgggtaacattgagtcccttaccaccagccgttttggttacatccaccacacgattgacagtatcaatcttcaactcatccaagggataggaaatatcgatggatgggttcattgtgactgttaaaatcataggtcacctcttagtcgtggtattctccacgatcccatttctcaaggaattctgtaaagaagtttgcgtctgtttgttgagcattgtgactttcaacatgttcaattttcgcaatcaattttttgttttcttcagttggtttgtattcagcatggatgaaagcttcgatgatatcacacataagcaattcaccagtaattttaccaccaaaaccaataacgttagcgttcaattgttctttagcataaagggctgttgtcatatcacgaaccaaggcagaacgaacacctggaactttatttacagcgttgttgataccaacaccagtaccacagatacatactccaagatcagcttgaccgctagttacagcttcccctacttttttaccaaagattgggtagtgagtccgtgtatggtcataggtaccaaagtcaatgacttcatatccttttgatttcaaaaattctgaaaccgccattttttcatcagttacgatgtggtcacatccaattgcaattctcatttttaacttacctttcttactataatctaattagcccattttgttcaacatgtcaacccggatttggtgacgaccaccgtcgtatttaccattaacaaatcctttagcgatatttttagccaattcatcaccaacaagttgtgctcccatagtgatcatacgtgagttgttgtggccacgagtcatataagctgaacgttcgtcagatacttctgcagcaaccattcctttgatcttagttgcaactataaatggaccagctccataagcatcaatcacgataccaaggttttgttcttctttgtttacttctgcagcaacagcgagagtcacatcaacaaagtcttgaccttcagctgtaacatccacaaggtggaagttttctttttctaagaagtctttcacaacttctttcaatctcaaacctgcagcatctgcaccgataacaatagacatattgtatactcctttttattttttctatgctggattccagcagtgtattgactgtctttaaaaaacagtcaattagtcctcacaaacctaatatactactattgtttgaagaagtcaacagcttttgtttgtttttgttatttattttttacttttttataaaacttctatctcaaaccctaattcttcaacctgattggcttctaagagacaaacattcttcttatcttctaaatgatctccttcttcaagggatgttgacaagccagaccatggttcaaaggtaatgaaaggtcccttgttcaaagttgaccagatgatgaggtttggaaattctgcaaaatgcactttcaatcccttatcatgtttaagagaacgaagggcaattgttcgagattgcaattcatccaaagtcactgcatctgtgctgaaaagatcataactaagatctatttctttttgtccctctagccatggacttctatcttggaaatccaacatacctgtttctgggaaaggacgtggaacagagcaaatctcttctttctcaaactctagataataatcttcatagacttcatcatcaagtagaggacaattaaatcctggatgtccaccaataaagtaaggcctgaccttgctagtttctttattagacttcctgaaaaactagaatcctagttcatgattgataataccagcaatcaaattcattcgtaatccgaagcgtttacgatgatttcgataggttgttgaaaacattttaaacgtttttactttggcaaagatgttctcaaccttgcttctctccttagatagcgcatggttataggctttatcttcaactgttagcggcttgagtttgctggatttacgtggagtttgtgcttgaggatatatcttcatgggtccttgataaccactgtcagccaagattttaccagcttgtccgatatttctgcgactcattttgaacaacttcatatcatgacaatagttcacagtgatatccaaagaaacaattctcccttgacttgtgacaatcgcttgagccttcatagcgtgaaatttctttttaccagaataattcgctaattctttttttaggtcgattgatttttacttccgtcgcatcaatcattaccgtgtcttcagaactgagaggagttcttgaaatcgtaacaccacctttgaacaagagttacttcaacccattggctccgacggagtaagttgctttcgtggataccaaaatcagccgcaatttcttcataagtgcggtattctcgcacatagtgaagagtggccataagaaggtcttctaggcttaatttaggttttcgtccaccttttgcgtgtttaagttgataagctgtttttaacacagctaacatctcttcaaaagtcgtgcgctgaacaccaacaagacatttaaatcgtgtatcagttagttgtttacttgcttcatcattcatagaactactataccatgttttgtttcgcaggaagtctaatattgtcaaatactggaacgctcattgctgggatacggaataagattggcccagcttcgataactgggatacctggttcaaaaccaaggtctgttgcagcgattggtgtaaagatatcgtaacctttcataaggtcttcgtttacatctttcaccataactgcatcacagtgaacatcgtaaccacggtttgaaagttcttcttctagagcacttttaatttggtgacttgagttaacacctgcaccgcaggcagcaagaattttaatcatttggatttcctccgattttattttttaatagacaagattaagcggttgcttcagcaatgtaagcataaagggcttctggttcagaaatttttgataggtcttcaagatgaccatttcctgtgaagaagtccattaactgagcaagaatgttcgtttgacttgaacttgaattattgatgataaagaagagcaaggatacttctacttccttacctggcgcaatcatattatggaaagtcaccggtttctctaatcgaacaaccaccactttctcagctagattatgaacaatatctgtgtgaggaatcattacatttgcaagtcctttcctagaaattccatatataaaccagttggaaatgacttttcacgcgtgatcaaggcttcacgataagttggagtgacaatttctcgttcttccaacaagcttgctacctgatcaaaaagttattcttgattatccgcttctaagcaaaacacaaggtttttgtcaaagaaataatctaataccataaggttttcccttctttccattaactttatgctataagtataacactatatgaaatcgttgttaattactttctattcttttttgtctctttttttatatttttgttttgtttatagtttgttatataaaaataaacacacaaacaaatactccaagcatttttctgttctaatactcaatgaaaatcaaagagcaaactaggaagctagccgcagttgttcaaaacacagttttgaggttgtagatgaaactgacgaagtcactcaaaacatggttttgaggttgtagatgaaactgacgaagtcgataaccatacatacggtaaggcgacgctgacgtggtttgaagagattttcgaagagtataaaaactaaaaaagcagaccatctaagcctgctttactattgattcttatataaatttcctgtgaacaaggaaaggcatttctgataacttattcttcatccatactcaagacgctgaggaaggcttcttgcggaacttcaactgatccgatggatttcatgcgtttcttaccagctttttgtttttcaaggagtttacgcttacgagaaacgtcaccaccataacatttagcaagtacgttcttacgaagggccttgatatcagtacgagcgacaatcttgtgtccaatagccgcttggattggaacttcaaattgttggcgagggatgattttcttgagtttatcaacgatgagtttcccacgttcgtaggcaaagtccttgtgaacgataaagctgagggcatccaccttatctccattgagaagaatatccattttcaccagcttagatgggcgatattctgacaattcgtagtcaaagcttgcataaccacgtgtcgaagacttaagtttatcaaagaagtcaaagacaatttcagcaagaggaatttgatagataacattgacacggttatcatcaatatagtccatagtcacaaagtccccacgcttacgctgagctagctccattactgctccgacgaactcctgtggtaccatgatttgcgccttgacataaggctcttcaatggtcgcaatcttagttgggtctggaaactcagatgggttagacacatccatagactcaccgtcggtcaaattaactttgtaaataacagacggagctgtcatgatgaggtcaatattgaactcacgctctaaacgttcctggataacatccatatggagaagtccaagaaatccacaacggaaaccaaatccaagtgcctgagatgtttctggttcaaactgaagactagcatcattcagttgcaatttttcaagcgcttcacgcaggtcattgtacttgtttgattcgattgggtagagacccgcaaagaccataggattcatctgcttataaccatgtaatggttctgccgcaggattggttgccaaggtaacggtatcacccacacgagtatcctgaaccgtcttgatagacgccgcaatgtaaccaacatcaccagtcgcaaggaaatcacgaccaaccgcttttggtgtaaaaataccgacttcggccacatcaaaggtcttactattgctcatgagctgaatcttatcaccaggtttgaccactccgtccatgacacgcacttggaggataaccccacggtaagcatcgtaaacagagtcgaaaatcaaggccttaagtggcgccgtcacatcacccgttggtgctggtactttttctacaatttgctcgaggatttcttcaatcccaataccagccttggcagaagccaaaactgcttcactggcatccaaaccaatcacatcttcaatctctgtacgcacgcgctccggatctgcagccggcaggtcaattttattaatgataggcatgatttccaaatcattatccaaagccagataaacgttggcaagagtttgagcctcaattccttgagccgcatcgaccaccaaaatagcaccctcacaggcagctagcgaacgtgaaacttcataggtaaagtcaacgtgccctggtgtgtcaatcaagtggaaaatataagtttccccatcttttgcagtgtaattcaactcgatggcattcaacttaatagtaattccacgttcccgctctagctccatgctatccaaaagctgggcctgcatttcacgacttgaaaccgtctctgttttttccaaaatgcggtctgctagagttgattttccgtggtcaatatgggcgataatagagaagttacggatcttctcctgtcgttttttcaattcttctaagttcatgattctcttcctttcagggtatctatttattataaattgtttttgatattttgacaagaccataccctgctaggagtactaatcttcagcgacaaagccgtcattttcgataaagtggtgttctgtcattccttggtctgtaaagacaatcccgtgaaggacaccaccataaacagctcctccatccattccaatcttgccatcttctgtagtccaaagctcagatgtaccgcgttcttgctgtaacaaaccatagaccggtgtatgaccgaagacaatggtttttccagtatgattttcagctccgtggaatggttttctaagccatacttttttataatctgttgtttcatgccagtcgtccaaggtcaaatcaatacctgcgtgaacaaagatatacttgtctgtctctactacaaatggcatttgacgaatgaattcgaccaagtctgccgcttcagcgcaacccgcttggcatcttctactccatcaactggtgcatccaagggacgacctaggatagagttaatggttgtatctccaccattgcgactataatggtcataactttcttctgggtcatctagccaagtcaaaaacatatactcgtggtttccggacaaacagatagccccttgattgtccaccaagtccttgaccatttcaagaacacggtgactatcctcacctctgtcaatcaaatcacctagaaagagcaactggggctgaccatcccaggttttgagaaggtcttccagcatcccagcttttccgtgaacatctccaattacataataatctgtcatcttatttctccctgtttctcaacaattctcttgcttgcgtcagggctgcttctgtcacatcatcacctgccaacatcttggcaacttcctccactcgctcttcgaccgtcaagagacgaacagtcgaaaccgttgaatggtcattactaatcttctcaataaagaattgataatctgcaatcgcaattacttgtggcaaatgggagatagccaaaacctgaccatgctgaccaattttatgaattttctgagcaatagcttgagcaacacgacctgaaactcccgtatccacctcatcaaagacaatgctagtcttgccttctttacgtgaaaaggcagacttaatggctaacatgagacgagataattcccctccagaagcaaccttaaccaagggtttaaagtcttctccagggttggttgaaatataaaactcaaccattttatttccctcacgactgaattttcccttactaaaacgaacctgaaactgggctttttccatataaagatcttgcagttcttgtttaatctcagcttcgagttgctgagccaaattatgacgagcagaagcaagttgacctgccaaattgacaagattgacttccaacttcttaagctctgcttccatgtcctcagacgaaagattattgcctgtcaagagattgtattcttccgtaatcttggcaaaataaagcaaaacatcatcaacagtcccaccatacttacgagtaatagtatgaaggaggtccaaacgattctcaacctgcatcaggcgattgccatcaaaatcaaggtcctcaatgatagcttccaaacgtttgctaatgtcttctaaaacatagtaggtctcagacagatagcttgaaatttcacggtattcaggatcatactcttcgacactttccatgtcattcatagctgaacgaacattggccagacttgaaaaatcttcattgtccaacatactgtaggcattggtcagtgtatccgcaatatttttgtggttgaggagtttatctcgctcttgattgagagccaagtcttctccagcctgcaagtttgctgcctcaatctctgccatttgaaattccaacatttcgatacgtgccttgtgttcctgttggtttttcttgacttccagaacctgcttgcgcattttccgataggcatcaaaactcgtttgataggtttctttcaagtcccaaaaagcggcatcaccaaattcatccaacatctggatatgcagttggggacgcattaactcctcatggtcatgctgaccatgaatatctacaagatgttgcccaatagctcgcaaaacagacagattaaccatctgaccatttacacggctgatactacgaccattttgcaagatttcccgacggatgataatttcatcacctaattctaaaccttgctcatcaaaaatttcctgtaaaagacgactattctcaactgagaaaagcccctcaatctctgcctttggtgcaccatgacgaataacatctgtcgtcgcacgagctcccaacatcatattcatggcatcaatgataatcgacttccctgcacccgtttcaccagtcaggacagtcatccccttttcaaaattgagggaaatagcctcaataatggcaaagttttttatcgaaatttcaagtaacatatagacctaccaattttttacttgttcaaagatttcctctgctagacttccacttctggcaatgactaaaatcgagctatcatcagtcaaacagctaaaaatcttgtctgcaaaagtctcgattaactgagcttttacaaaagccgtatttcctggaataacttggagattgatcatcttatccatcaattcagccgattcgatattgtcttcagccagttgcagactttttacgattgattttggcaattcgtagacataggtgttgtctctcaaaggaattttgacaatacctaactctttgatatctcgggataccgtcgcctgagtggcagtgatacctgcttctttcaaatgttctacaatttcttcttgcgtgccgatttgataatctgtcaccaatcttctaattttttcaagtctctcttttttattcatttttaaattgactatgcgccctctctactgcttctttaatctcagcaagaatctgattgcttgctgacttttcttttttcaaatacgctaaaaattcaatatttccatgtccaccttggatgggagaaaagtccaagccaaggactgaaaaacctacctctactgccatagctgttacagattcaaggacattctgatgaaccttagcatctcgaataattccatttttcccaatctgctcacgtcctgcctcaaactgaggtttgacaagtgctaccacctgaccttgatcagccaagacacggtgcaaggctggcaaaatcagactaagggaaatgaaactcacatcaatactggcaaagctcggctcctgctcgaaatcagtcttttcagcatagcggaaattgaactgctccatgctgacaactcgtgggtcttggcgtaatttccaagccaactgattggtaccaacatcgactgcaaagaccaacttggcactattctgtagcatgacatcggtaaaacctccagtagaggccccgatatcaatcgtagtcgcgccatccaccgacaaatcaaagacctgcaagccttttccagtttcaaaccaccacggctgacatacttgagtttctcccccttgagttttaattcggtgtcatctggaattttctctcctggcttgtcaaaccgttctccattaaggactgctacgactaggccagccatcacacctcgcttggcctgctctctcgtttcaaacaacccctgtttataagctagtacatccactctttccttagccattgattctcaaactttctactacacttacaatcgattctgtttcaaagggaagctgctgggcaatttcttctaatttttcattagcttgatccagggtttggttacaaaaggcaatggactcttccaagcccaacagggcaggataggttgatttttctgcctgcagatccttttgaggtgtcttgccgatttcctcaaaactagctgtcacatccagtacatcatctctgacttgaaaagcaagtccaatcaattcacccacagttttcagcttcacctgcatttcaggtgacaattcagctataatagctgccgcttggaagggataggctagtaacttcccagtcttattggcatgaatagtctgaagttcttccaaagacaagtgctggtgttcgccctccatatccaaaacttgccctgctaccatacccagactacctgaagcaagggataagttggcaatcaagtccaccttaatctgacttggcaaatctgcctgcgcaatcaaggcatatgagtctaagaataaggcatctccagccaaaatggccatagcttcaccgaatttcttgtgattggttaaccgccctcttcgataatcgtcatcatccatagcaggaaggtcatcgtgaatcaagctccctgtatgaatcatctctaaggcagtagctacctgcgcgtgagcaggtttgatggtaacctgcaaggcttccagaacttctaacaagagaaaaggccgaatacgcttgccaccagcatgaatagaatagagaacagactcccgtaaactagaggcaaactgctggtctccataaaaatcttccaaagccgactcgacaagagctaatttttcttgctttttcattcaaaatcactttctgttccgtcttcttgcatgaccttgaccaaggtcttttcagccttgtccagcgtagcttggagctcttttgacaagaccatgcccttttgaaaggcagtaatcgcatcttccagagcaatttcaccattttccaaactttggacaatggtttccagttctgctagattttcctcaaatttcttttgttttgacatctttaacctctaattctacttgaccatctcgcatcaaaagcgttacttggtcttttttcttcaaactctcaaccgaatctacaacggactcttcttttttgacaatagcataaccacgcgccacgattcggctagtatccaacatgagcaaagcttccgaaagtcgcttggcctcagcaaccttggcgtcataaactaacgccatttggctacctaagagcttgtccaactgtcctaaacggtcttgatagcgttggattttggtaacaggtgataattgtactaattgatgagttcttgcttgaactaattgtttgttatcagaaatccgagttcgcaaactttgtttcaaacgcagttgcagttggtccaagcgttgcaaataaccgtcatacaagcgctcaggttgtctaaagataacagactgactgcattttttcaaagcctcttgtttcttagatagaacatttcggactgccgttaccatccgtttttcctgattttgcaaatgagctaatacatccaacttggtcacaggtgttgccagttcagccgccgctgttggcgttgcagcgcgtcgatctgccacaaaatctgccaaggtcacatccgtctcatgccccacactagagataactggcaaacgagattcaaaaatagctcgtaccacaatttcttcgttaaaggcccagagatcctcaatagaaccacctccacgaccaataatgagcaaatccaaatcgtcccgttgattagcacgcgcaatatttctagcaatttcctccgcagccccttcaccttgaaccttggtcggataaagaaggatgtcaacacctgggaatcgcctgctgacggtcgtgataatatctcgaataacggctccactacggctggttactacaccaattctcttagaaaattggggcagagcttgcttgaagcgttcttgaaacaggccttcttctgtcaattttttcttaagttgttcaaactgaatcgcaagcgccccaaccccatcaggctcagctttttcaatgatgatggagtagctaccacttggttcatagacctgtacacgcccaatcacattgatcttcattccttcttccaggtcaaaccctaatttctgataaatcccagaccagatggtcgcttgaataactgcatggtcatcctttagggagaaatattggtgagtaggtcgtttacgaaagttggaaacttgaccagttaaatagacccgttccaagtatgggtctttatcgaatttcattttcagatacttggtcaaagttgttaccgataaatacttttccatctccacctactattcatttacttgctctttcatgggtattattataccaaaaatatgcctaaaaatctccatttatgtaccattatgagggaaaaatagaaaaaggaggcaaggcctccacatgtgattatttgctgtttcgagcttcttccaaaatctttgcaatcttggtcgtcaacaggtcgatagccacggtattgctaaccccttcaggaatgacgatatcagcataacgcttagttgactcgataaactggtggtacattggtttgaccacacctaagtactggttaataacgctatcaaggctacggccacgctcctccatatcacgcttgatacgacgaataatgcgcacatcgtcatccgtatccacaaaaatcttgatatccatcaaatcgcgcagacgcttgtcctccaagaccaaaataccctcaacgataaagacatcttgaggttcctgacgataggtcttgctactccgtgtatgctctgtatagtcgtaggtcgggatgtccaccggacgccctgccaacaattccttaatctgctcgatcatcaagtctgtatcaaaggcaaaaggatggtcatagttggttttgacacgctcttcaaaggtcaaatgagactgatccttgtagtatgaatcatgctcaatcatggaaatcttttcatcaggaaaatgcgataaaatggctcttgaaacactggttttaccaccaccagaaccacctgtcactccaataatgattggtctattttgcatgctatcctccgttattttatccgtcgtctattctatcacattttttacaaaatttatagtctcatcagcaaaaaacaccagagtcttccctctgatgttcgacagttttaacgaaagccctgtagggtttgagcaagcatctgcaagaaagccagtctccctctttcctggctaggagctttggcaatccataaaccaaaatcaatgacagacttaggtgcctggtaatgatgcgtcatgaggtaaagtgacaacccttgactcaaattggccatgaccgattggtatttttcatttctgtctaaattttgtatagcaagacgaaacaggtgactcaactcactattttcatttatttctttttgttgaagaagttgctccaccctttctcgaaactcatttcgcatcatggaattatcacaccaaatcctgggcctaagttcccatcagaacctgtaatggactctaaatatttatctgaaagaattttaaattgcttcatttcacacctctaaatttctatatagattatttgagtacctacaactcgcaacaattggaatattataattcccaaaaccattctactattagtatggggttttatcaagcaattgttatctatcacccgatttttattcctaaacgatctagctaaaaaccttccttggcttatagagattgccccgtttttctagaatggctaacaatttatcatcttcaaaggcagccagttctttgtccgtttggtctagctcaataaaacgaccaaagcgaacttctgtagcctcttctggacttaggaaaactttgacaaggtcacctgtcccaatctctaaaggatggagaaaatctaattgcccagcctctactttttcagcaatttcctccaaggcaagagcgtcttctaattgtaagccagcagcactagtacgagtcaaatgggacatatgagccgcataaccaagcttttcacccaaatcaactgacaaagtacggatgtacgtccctttactgcattttacacgaaaagtgaatcgggcaagttggccatcataagaaatcggacttgttcgctcaaattgataaatggtcacctgacgttctggacgctccacttcctgaccagcacgcgcatactcatagagcttgcgaccattaaccttaactgccgaatacatagggggaatctgagtaataggcccagtcaagctagcaatcgcttcatcaacaagcttttcatccaagagagacaaaacaggggtttctgcgaccacttccccactagcatcctcagtcttcgtggaatagcccagagtgatttccccctcatagatcttaccctcgtcctgcataaactcgaccatgcgtgtcgccttgccaaccgcaatcggcaaaacacccaccacatccggatccaaggttccaccatgaccaattttcttggttcccaaaatcttacgcagtttaaaaaccgcatcatgcgaggtcattcctgcttccttttttaagttaataataccgttcatttttgctttctactcccccttcagtgcttcgaacttcgctttcattgttggatttttccgggtcaattttttaacagagacatcttccaatttgttgttagctaaacggagttggttttcagatgtggtcaggaatttcttaacctcttccatgcgtttgatggccttgtcgatttcatcaatagcttttccaaagttagtcgaagctgaattatagttcttagcaaaagctagcttaaaggcatccaaatcttcctcaaaatgcgtaatgtcaatattttgctcgcgaaccaaggccaactcctgcttgtattttagggaatttagcgccgcattacgtaagagaccaatcaattggataaagaattgaggacgaacaacatacattttttcatactcgtgactgacgtcaacaatccctgtgttaaagtagtcattatcagcctcaagcatggtcaccaaaacggcatactcacagttcttctcccgacggtccttgtccaattccttgtaaaaatctgcattcttgtgcttcttctctgttccgtccgcttcgtttttcatctcaaacatgatagaaatgatttcaactccattttcatcacactcacggaagataaagtcccctttagacccacgcgaagagaccttgttatccttctcaaagtaagcatttggaaaggcgaaactacgaaccttgttaaactcactctctgcatactgttctaggctttccccaatcgcttttgtagattgttgagccttaaaattcttataaaactcgacttgttcactagctgccttgagctgggcttcgtagttttgcttaacagaagccaaagataattcattttccttttcctgcaaaagtagttggtttttaacctgatcccgttctttttctaggtcagaaagggtcttttgtagttgattttcatgctccaaacgcaaggtagccaactgattttctaagagctgtacttccttgtccttagccaagagagcctcatggcttgtctgttcaacctctttcttggccaattctttttctgtatcaaagttttggatctgactctgtaattgcgcaatttcttgatccttctgagccagtttagtctgttgctcattcatggccttttgctcagccaaggccagttcctgcttcatcctatcgtgtagttccttatcaaactctgccgttctcacttgggacaagagttcggcatactgactctcatttactgtaaagacttccccacagttgggacatttgatttcgttcatatcgttcctctttctagacttctgtaaccattatatcatgcctgagggaaaatcaaaaacagtgagtcgaagcccactgtttatcttcttttactttaaattttttccaaggccaagcgcaagtcttcaatcaaatcttctacattttcaagaccgattgacaaacgaatttagtttggtgtgacacctgctgcttctaggtctttttctgacaattgaccgtgagtggttgttgctggatggacaacaagcgatttagcatctgccgcgtttgcaaggtcagaaaagatttctaaattatcaatgaccttgcgtgcttcttcctcgccacctttgacgtggaaggtaaagattgaaccgacaccttttggcaagtatttctcagccaaggcatgataaggactatctgcaagttttggataatttaccttttctaccttaggatggttgacaagaaaatcaacaattgtctcagcattttgtacatggcgttccacacgaagtgaagaggtttcaagtctttgtagcaagaggaaagcattgaatggtgacaaggctgcacctgtatcacgaagcaattgaactcgaacagctataataaaggctgctgcacccacatcacgagtatagctcaaattgtggcagcttggaccctcgtcaacaaattgagggaatttccctgaagccgtccagtcaaaacgaccactatcgacaattattcctccaatagttgtaccatgcccaccgataaacttagtcacagagtgaatggcaatgtcaacgccatgagagaagacgttaatcaaataaggtgttgcaaaagtattgtctgacacaagtgggatttgatgtttatgagcaatctctgccagtttttccaggtctggaatattaatcaaggggttacccaaggtttcaatcaagacaagcttggtattgtctttgatagctgcttctacttcctccaaattatcaatatcgaaaaaggttgttgtgataccataacgaggaaggggttctttcaaaagattgaaggttccaccgtaaatagtcgaagcagccactacatggtcaccagcatgggcaatcgccaaaatcgtataagtcactgcagtcatacctgatgctgttgctagcgcttcaacaccaccttcaagggcagctgttgtaggattggtgatacgagtataaatgttccctggtttcctcaaggcaaacagatcggcaccttcctacgtgtcatcaaaaacaaaaaatgttgtttgataaatcggcactgcacgagacttagtagctggagccacaacttgaccagcatgtagttgtagagtttcaaatttaaaatcacaagtcataaggtgacctccatattattttattaaggatattgtagcaccttgagttatagtttacaaatatcagttttctatattttgatataagaaatagctattaccttattttgaaaatgaaaaaagcacgactcaatcgtgctcattttcttaatctacataagtatcttcgtttttattgaggaaggcatatggaagacccatcaagaggcctcctccgataaagtttccgatgaaagtcacaccccagtggcgaagcatatttccaacaccgaagttggcaattgaatccgcagcaacactgaatttcacaatcgcgaaagaagcaaagttcgccgcaatgtgctcgtttgttaagaatacaaacatgtaaatagctgacaacacaagccaaagtttggcaccaccatctttgaccaaaataaatgacagaatcgcaatatttacaaaaatatttgccaaaatcgcctcaagcaagaccaattcatttgagcggcctaacttcatctcaacaacacctgagatgaaactatcgtgtgtcagattcgcataggctgccgaatgagcaaagccccaccctgctatcaaggctccgataaggttgaacaaggtacagtatagtaaaatctcagctgtttttctccaagagattttttttaagaaactaccagcagtcaagaacatcatgtttgaagtgaccaactcggcattcaaaaaaacaatgtaggccaagccccaagcaaaaacgaatggaaagaggaagcgtccactacctggtgcaattttattaatcaagtcagccccaactgcacctgcagcagtactgaaggttaaaaatgcacctgcgaacatcgaacgaatcgcatacttaaatttgctttgactataaagactttctttcttattgcaagcaaattcaatctttgagataaattccgaagaaaccataataaactcctaaatcttttttcttgataattatatcacaaactttaggttttaggaagcgttttctgtatttcataaaagtttatagtagattgaaactagaatagtacacctctacttctaaaacattgttagaaatcgatttgactgtcctgatcgatttgtcctattcttatttcattttactatatttttatgaaaatcttaaaaaatcagtgaaatcatggatttcactgatttgtattaataaaattgtttatatggttgattgaaagctgttaggatttcattagatgtttgtgaataatcttttgtttctttcaaatcacctttgacaataatacgttctgtagcagcaaggtcttcacaggttactaatgtgatttcattgaccccatctctatcatcaacttcatcaacacgatccggtgtcacacgtttgacttcacgtatttcataagtataaactttatttttatcggttagataaatcttcatgccatttttagcattatctaaaggagaaaataacattttattagcattatcaacaccaaagatatggtgactagctagactataatttccttctcccattacttgctcgcgtttcattgtaccagctccgtagaagagattaacattatcaagtcctttaaaaatcggcaaattcatttccaattcaggaattgcaattcccccaataactggtaatttttgagcatcccattgagaagttagaacagcttccgaagagatagctttgacagaatcaaagtcaaaattgccttctgtatcctgattttcttctaatttttcttttgatacctggctaacttgatacttattggtattccagactatgaaaatatttcgaatttgagtattaaaaatcaaagccagtgacagtaatatcagaaatcctgctaggatatttgtcagcagattttttcgcttgtttttctttttattatttttttgagacattatgcttcaccttctgtttcgttttctgtcccaacttcttctttttctgccaccgcaaccgttgtgaaagtcactatctgagcatcttgatccaggcgcattactttaactcccatagttgcacgtcctgtttgtgaaatattggcaagattggttcgaatcatgacacctgtatcagtgataatcatcaaatcctcatccccttgaacagtcataagaccggccagcaagccatttttttcggtaattttagctgtctgcattcccttaccaccacgaccttttgttgggtattcagtagcgactgtacgcttaccatatcctttttctgtgataataagaacctcatcttgatcagtaatcaagctggcaccaacaactgtgtctccttcacgaaggttaacacctttcacaccagtggcgatacggctcataccacgaacggcgattgattaaagcgaactgcataaccaaacttggtaccaatgataatatccatatctccttctgccaacaagacattgattaactcatcttcatcctttaaattcagcgctttgagaccattttgacgaatattggcaaactccttaacactggttctcttcacaataccgtgacgggttgtaaagaagagataagcatcatcactgcgatcagactcaacattgataaccgtctgaatactttcgtcttcatccaatttcaagagattgactactggtagccctttggcagtccgaccatactcaggaatttcataacctttaagacgatagacacgtcccttgtttgtgaagaagagcagatgatcatgggtgctagttgacactaactcacgaacaaagtcatcatctttcactcccgttccttggacaccacgacccccacgtttttgagcagtgaactcgtcctgatccaaacgcttaatgtagcctctgttagaaagggtaatcaagacatccgattcttcaatcaagtcctcatcctcgagactcaagacctgtccaatcatcaactctgtacggcgcttatcagaaaatttacgtttaacttcatccaattcgtctttgataatttgagaaacacgttcaggcttagcaagaatatctgctaaatccgcaatcagagccaagaggtcatcatactcagattgaatcttatcgcgttccaaacctgtcaaacgacgaagacgcatatcaaggatagcttgactttgacgttcagaaagcttaaacttgctcatcaactcagcttgagcttccgcatccgtttcactagcacggatgatacgaatcacttcgtcgatatggtctagcgcaatcaagagaccttctaagatatgagcgcgcgcttccgctttttccttatcaaaacgtgtacgacgaacaaccacttctttttggtgctcgatataagcatccaaaatctgacgaagagacaaaattttcggtataccattttggatagcgagcatattgaaaccaaaattggtttgcatttgggtcattttgaagaggttattgagaataacattggctgaggcgtcgcgcttgacttcaataacaaatcgaacaccttcacggtttgactcatcacgtactgctgtgataccctcaatgcgtttttcctgaaccaagcgaacaatatgctcatgcaccttggttttattgaccatgtaaggaaattctgttacaacgatacgctcacgaccagtcttagtcgtttcaatctctgtacgagaacgtaggacaatcgaacctttacctgtttcataagccttatggatacctgatttccccatgacaagagcaccagttggaaaatctggtccaggcaagacttccatcaagtccttggtagtcacttcaggattatccatgaccaacttcactgcatcaatggtttcacccagattatgaggtggaatattggttgccatcccaaccgcgataccagttgctccattaaccaaaaggtttggaaaacgcgctggcaagaccaagggttcccgttcattggcatcatagttatcaacgaaatcaactgtatttttgttgatatcacgaagcatttccagagcaatcttgctcatacgtgcctcggtataacgttgagcggcagcactatctccatccatggaaccaaaattcccatgaccatctacaagcatgtaacggtagctccaccattgagccatacggaccatggcttcataaatagaggaatccccgtgtgggtgatatttacccatgacatcccctgtaatacgagcagattttttatggggtttgtctggggtcacacccaattcattcattccgtagagaatgcgacggtgaacaggttttaagccatctcgaacatcaggaagagctcgcgctacgataacactcatggcgtagtcgataaaacttgccttcatctcctttgtcagattgacattcactaaatttttatcctgcattaataaatgcctcatttcacaattagtaagtaacaacattataccataaattcccatctatttcagcctctaaaccactaaaacgtttacatcgagaactataaggcatattcgtgacaaagttttttaaaagtgatagaatgaagttgtctagggaaaatcccctaataaaattaaggagatgtttaaaacaatgacttcaactaaacaacacaaaaaagttatccttgtcggtgatggtgctgtaggttcatcttacgcttttgcacttgttaaccaaggaattgcacaagagcttggaattatcgaaattccacaattgcatgaaaaagctgttggtgatgcgcttgaccttagtcacgcccttgccttcacttcacctaaaaaaatctatgcagctcaatactctgactgtgcagacgctgaccttgttgtgatcactgcaggtgcacctcaaaaaccaggtgaaactcgtcttgaccttgtaggtaaaaaccttgctatcaacaaatcaatcgtaactcaagttgttgaatctggtttcaaaggtatcttccttgttgctgctaacccagttgacgttttgacttactcaacttggaaattctctggtttccctaaagaacgcgttatcggttcaggtacttcacttgactcagctcgtttccgtcaagcacttgctgaaaaattggatgtggatgctcgttcagtgcacgcctacatcatgggtgaacacggtgactctgagttcgctgtttggtcacacgctaacatcgctggtgtaaaccttgaagaattccttaaagacactcaaaatgttcaagaagctgaattgattgaattgttcgaaggtgttcgtgatgcagcctacacaatcatcaacaaaaaaggtgcaacatactacggtatcgcagtagcccttgctcgtatcactaaagcaatccttgacgatgaaaacgcagtacttccactttcagtattccaagaaggtcaatacggagttgagaatgtctttatcggtcaaccagctgttgttggtgcacatggtatcgttcgtccagtaaatatcccattgaacgacgcagaaactcaaaaaatgcaagcatctgctaaagaattacaagctatcattgacgaagcatggaaaaacccagaattccaagaagcttctaaaaactaatttaactatagacaactccttgaattatcagggagttgtttttttctgtattatagtaggttgaagttgaaatagccccccattactctaaaacgttgttataaaatgctttaaattcctaattgatttgttcatatcttatttcaatccattatacatcttcccacaataaaacgcataataccaaggattgtctgaactgccccccaaaagttagattttttctgtctaacttttggggggcagtacaaaagcactcaatattatgcgttttttctgatttcaaagaattttgactcggccttctttttaattattttcaaaataggaatcaaccaacttttgaatgctcccttctttagccgctggaatggtatctgctaaaacaaaattcttcctactgatatctttagaaagattgccaaatataaaattagtggaaatgttatagataatctcagacggagcaaatccataaacttgcttttccaaaatatgttttaagcgttcttcaggatttggaaaggcctctttcaagccattgctattatataaccgcttcacaagttctgcaatatagaggcctgacttcatatataaatcaataaaagtcttagatggatcatcaaaaatccctggattttccttttccaaatcatctaccatccttttcaccactcgtttaggagtgaaaatttggttggtcttctgcggtggaatatagtcaaaaatgtcttctttttgatctttaaaataatccgccaactcctttttcttgcgaagaaattcttgaatagcttcgtcaaatgttgctttatcaaagagatgccctgcaaaatcctgcccaccatctcgcaaatatctaaactgatcaatcgtaatccctgttacttcataaaaaacatgttcaggaacaaaggcatcaaaattatcaagtgttagagtttgatcaccgtaagccataataaaacttggaattgttcttgcaaaccctcgtaaatggtcacgaatttcatcttgagctgattgtttcaactgttccacacgttttatctcaacctgttcgataaatttctcaggcattttttccacttcttttttgagtgtttgttctagtttttctttatgaatgagtttattttcttctaaacgtttttccaaatcttcttgaatcttatctttttgcgctttatcatttgcttctttgagctgctgttgcaactcttgcttgatatgagcttcagaaatttttctttcgatatcattttttcgaatttcattctcaagtgttgctgtaatttgtttcttaatttgctcagtttcccttgtttttagagaataatctgctttcaattcctctacaatcactgaagaaacggtcttactcaagtcattgaccagctgtttttgagttcgttcctcatcttttgtgactaactcagcaacagattcaccaagtccataaactttttcaccaaaaagtcgcatttgctgattaactacaatttcatggtctactactgcatttccctcatcatcgactgtaacatctgaaaaatctaataaatcagaactatcttgtaccttcccttccttttcaactggcagctcatttaaaatatctaaaactgtttgacttgcttggaaaataccactaatattatcaaataagagattggacataaaacctcgtttaagaacttctctagcttttatctggcgaggagtggttagaactgcctttgcatcaatttcaaccatcttaccagcacggtcttcggcaataattggaaagaagtttaataattctctaatattttcttcgcgtgtagctgaagttcctctaccagctgcagttacaagcaataagttgttggcaaactcatcaaagagaatcaaggttctttccggcgcaaagtcaaatacataggctctttctttgcgaaagtgatttcctttgttatcgctccatgagtaaggattttgagcacggaaggcggcctgcatataaagagctggtgatttcaaatttgataacatcaatacacctgtccattcagggatagtgacacctgtcgtcagctgaccaacggatagggtaatggttttgtcattctctgctatcgcttttctaaccaagtccaaggatttgagtttgactttatcgtcttcttcggacatacgtccgtcaccagcagctagaacgatctcatagttttcatagattgggtgttcttctagtagggcttttaatgctttggccgaagcgacacgttctaaaagccaaaaagtatgcttgagttcattacggagttctttggttgaaaatggatatttttcattgcttgatagagtatctaaccaatttctgacatcatgctcatgaataaatttccctttatcatctgtagcgaaaaattcacttaagtcaaaaacatagtcaatattttcaccatcgatctgagcgcctttttctaacttttcgccaatcatctgagacatttgataggtaaagagattcaactgaggcaagctttcataaggattttcctcttcttgctcaagagaccacgaatacttagcagcctgctcatcagcataagaccagttgtagatttgttcctctgtaaaatctcctttagccaatgctttaaatgatgtacctgacaaatgcagagtaaaatttcgtcgaatcttattaaaggcttggtcagtcttgaaggtatcaactccttcatgagcctcgtcaataaccaacaagtcccaatgcagatcagttacccatttgagtttatcgtgctctccacctaaataaacagatcctttcaagtcttggagactgataaaagcaagttgtcttacatcgtcagctaaaataccaagaaattcttgtcgtgacaagattggacgactcttaaggctatctgattcagaaacaaacttgtaagtcgtttgacctgctatgaatgtttcaaaatcatcataccatgagttagcaatggcagggcggtttgttacaattaggacattgacagcttccatccgtcgagctaggtcataggtagacaaggttttaccaaagcgtggcttggcattccagagaaacttgcctccagcatgttcttggaaataagctaatgtcttagcaactgcttcttcttgctcttgtcgcagagtatagtcctgtccttttccaggctgataaccagacaaatcatgctgaacaaacttatcaaaaagattttttgatttttcaggagttccattaaaatagaaccattccgtcttgggacgacgttctacatcatggaaagaaaggaaatggtggaaatcatggtccttgaaagttttccccttatcaggctcttctgtataagctgcatcaccagtccataagacatctgtagctatatgagctgtatgcgtttgctccttgatacgttgtgtgacatcacgttctgtatacccaatcttaatccagccttcattactggttactgtcggtgtggtgtaggcatagattttaggatgaatttctttagtggttttaatttctactggcataagttttccttttttgaacgtttgctaacgaagtcaatttatctaacaaatgactttctcatctcataagtacaaaaagggtcagggcatcgtatgcttcctgacctaatcctatatagtcattttagatcattgagcactatttgtcaaataaaaatacttttctaatccatctcccttacatgattctcaataaaggcaatttcttcaggggaaaggtcatatttttgatcaagctggcggtcaatatcagtcactgattgtgtccaatcaatgtccgaattgaccgtaaagtcttggagggggacgtaataccaagttttgcgtgaattatgctgagtaactttcaaaacacctaataatactctagcgaatttagttttaataaatttaatacaagcatcggcttcaaattttgttttaaaattaccaatagataaaaaagtatctgtatgcccgattaggggttccccgattaggggtgttgataagacttcacctaaggcaccacttccattagcttctggtacaaaaacattataattttcgaatgtttccggtaaatctaaatattttttattaatatatcgataaacacgttcggagccaattcttccaagtagagcaacatggtctttttcttcgttgtttttgaaaacaaaatctaactgagttagtgatttcgaaacaattttattttttgtcccttttccttgcagcttttcagcatttggataatcagaaaaaagtttatttgaaaatctataaataccttgaggataaactaaatcagaaaaagtttcaaattctggatgtttttcgattttttttacaataccattcaaagtttcaaaaatagtaaatactccgattggtcccaaatctttatcaacatcacgataagttattgctactccacccttaatatccgttcctgtaaatactttaccgcttttaagttcatagaattgaacttttaaatgcttgtcttcaagcatcttttccatccaatttttaggagtttgaccagctttaaataaaaaccttgctggggtgattagtatagatttatctgcgattttataagcttcatcaataaaatagtgatatatcggctcatctctggcttctcctgtttcctgatacggaggatttcctatcacgacatcaaatttcatttcactttcctcgctagataggcgctcaaaacctatcattctattctttttccagtctttgatatgggttttagattcttctacttcttggacttctagctcatccgcaaacaaactcaattgttgagattgcttttgtttagctgaataaggactactttttttcaatccatccatctgaaagacattgtaagagataatagtcgcaatttctttcttttgctctaatgttggttgatttccagtcttagctagataatagtcctcaaaagttgccaaaagattctcacgcgccaaaaggagagaatctccttgatactcataaccatacgaagcatgataagcatcttttacaagtttataaaatgtgacttcatctgaaacctcacgactaatccgttgcagttttctatcaacaaaaccaactcgctcagataatggaatttcctcaccagttacggtatcatatctcgttaccatataaggtgcttcaccacaagttacctctaaccatcgtaagtccacatactcctcaagacttaacgagcctaatttcgattctacatatccattttgctttgcgaccaaccacgttggtgtaaacacttctgcccttatttttgtccgatctttttgttcatatttggatttttcagatctgggctgaatcaagttggcaaagtttccagtaaccttacttggattgatgcgatcacttggagcaaatccctttcctaacaattcataagaatgcgtagcccaaacaattgatttctttgtcgttcgatcttttaaaagaatttttaataagtcagccgattctttagccaaactttcttcactaatatctattgtcatcagcaacctctcttatattgtaagccctattatatcatattttaaagaatgaaaatttacttgaaaaaagtaattcaataaatatctctccgatgaccaacttctagagtagcaacgactaattcatcatctacaatttgtacgataactcgataattaccaattctatagcgccattgaccaacgcgattaccaaccaaagcctttccgtgtcgtcttgggtcttccaaaacattggtttgtaaatagtttgtaattagcttctgcgtataacggtccaattttttcaattgcttgataaaacgtcttgttggaactaatttatacaaattattcatccttcaagcctaaatcatgcatcatttcttcccaagtaatgggttcaactcctttttccaagtcttctaaatactcttgataggctaaatctgccacacgagcatcgtattcatcttctagggcttcaagagttttggtgcgaataagttccgaaagggaaactccttcaaacttagccattgctttcataaatgttttatcagcttcagaaacttttaatgtaatagtagtcatcttttgtgctcccttttttaatggtaacaccattgtattactttttaggtgttcagtcaatataaaaagaacaccttctcagcgttctttctatatctctgtcaatggtgttgcggtatctggtgaggtatcataaaccttaaagtctactccgactcccagatcagcttgagccagctgattgaccatggtcatatgagccagttccttgatattgttttccttagataaatgcccaaggtaaatcttcttagtacgatttcctagcgtccgaatcatagcttcagcaccgtcctcgttagaaaggtgaccaaggtcagataggattcgttgtttgagtcgccaagcgtaagaacctgatcgcaaaatctctacatcatggttggcctcgataagataaccatccgcattttcgacaatgcccgccatacggtcactgacataacctgtatctgtcaagaggacaaaactcttatcatccttcataaagcgatagaactgcggtgcgactgcatcatggcttacaccaaaactctcgatgtcgatatctccaaaggttttggttttacccatttcaaaaatatgcttttgcgaagaatccaccttgccaagatatttactattttccatagcttgccaggtcttttcattggcataaagatccataccatacttgcgagccaaaacgcctactccatggatatgatctgaatgctcatgggtaatcaagatggcatccaggtcttctggcttacggttaatttcagctagcagactggtaattttcttgccagacaagcctgcatctactaaaagcttcttttttgaggtttccagataaaaagaatttccactggaacccgacgctaaaatactgtatttaaagcctatttcactcattctagtcttctacttcatcctcccatacttcttctttcactgcatccttatcataagggagtacaatggtaaaggttgaacccttgccgtattcactcttggcccaaataaagcccttatgttgtttgataatttctttagcgatagacagtcctagacctgtaccaccttgtgcacgacttctagcacgatccacacgatagaaacggtcaaagatacgtggtaaatcctgcttaggaatccccaaaccgtggtcagaaatggataaaatcatctggtcttcagttgtcttcattctgacagtgattttacccccatctggcgaatacttaatagcattatttaaaatattgtcgacaacctgcgtcatcttatctgtatcaatttccatccagatagaattgatgggataatctctcaccaactcatattttttctccttttcctgtcctttcatcttgtcaaaacgattgaggataaaggtaataaaagcagtgaagttaatcagttccacatctaggtgactggtagcattatcaatacgtgaaagatggaggagatccgtcaccatgcgcatcatacggttggtctcatcaagagaaaccttgataaagtctggtgctacagtttcacacaaagccccctcatccaaggcttcaagataggattttacgctagtcagaggagtccgtaactcatggctaacattggaaacaaagagtcttcgttcgcgttcttccttctcctgctccgtcgtatcatgcaaaacagccaccaaacctgaaataaagccagactctcgacgtatcaaggcaaagcgaactcgaaggttcaaatattcgccattgatatcttgggaatctagcaacaattctggactttgggtaatcaaatcacgcaattcatagttttcttctatcttgagcaattccaaaatgcttctattcagaacatcttccttaaccaaccccagttgcttcttggctgtatcgttaatcatgataatctgaccccgacggttagtcgcaagaaccccatctgtcatataaaacagaatactatttagcctcttactctcttgttctagattttcctgagtgagacgaataacctccgacaagtcattcaaattattggtaatattggtgatttcagacccaccttgcatatcaagaaccttggaataatctcctgcaatcaaatctttaaccttttgattgacttgcttcaactgaatattatcacgtctattttccagtaataagagggtcacaacaaggatgaaacctaacaaaatcaggataaagataaaatctctggtaaaaatggtttgtttcagtaaatcaagcattatttctcatgtaataccctacaccacggcgcgtcaagatatactctggtcggctgggcgtatcttcaatcttctcacgcagacgtcgtacagtcacatcaactgtacggacatcaccaaaatagtcataaccccagacagtctcaagcaagtgttcgcgcgtgatgacttgacctgtatgcgatgctaaatgatacaaaagctcaaattcacgatgggttaagtctagttcttcgccatattttttagccacgtaggcgtctggaacaatttctaaatccccaatttggataggttgaggtttactatctgcttcctgaccatctactggcataggttgagaacgacgcagaagagctttaacacgcgcctgcaactcacgattggagaagggttttgttacatagtcatctgccccaagttccaaaccgataaccttatcaaattcactatctttggctgaaagcataagaatgggcacactgcttgtcttacgaatggtcttagcaacttctaaaccatcaatttctggaagcatcaaatccagaataataatatctggttgctctgcttcaaattgctctagcgcttcacgaccattaaaagcagttacaacttcgtaaccttccttggtcatattaaacttgataatatccgagattggtttctcatcatctacaattagtatttttttcatatgttcacctttttctctactattataccaaaaaaatagtcagaagacacaatagctagtcttggctactgtctaagttggcttgtgcataaacctgccagattttttgttggggtttggcaagtgggtaattcttgaattcttctggtgaaagccagcgaacttccctatctgaaaaatcatggaagtcactcacctgacctgctacaatctgtacatgccattttcgatgactaaaaacatgctggactgtatcaaaacaaacatcaagccaatcaacatctaggtcatagtcctgctggaaactctcttctggactgggaccaaagttcacactttcttccgcaacctgatgaaagaggtcaaactgctcttcttgcgaaaagttatcaacttctataaaggggaaatgccaaaaacctgccaagagcttttcgctttcatttttttcaagtaaaaattgtccttgagaatttttcacaactaaggctttaagataaataggaaccggctttttcttaggagatttaattggataacggtccatggttccattctgatatgccgcactaaagtccttgactgggctttcttcaggtctgggatttacaggagactcaatatcagaccctaagtccatcaaggcttgattaaaatcacccggacgatccggattaatcaagatctccatcattgcctgaaaaatttttcgattacttggaatcccaatatcgtggttgacttcaaacagacgcgccaagacccgcatgacattaccatctacagctggctcaggcaagttaaaagcaatactggaaatggctcctgctgtgtaaggtccaatccctttcaagctggaaattccttcataggtatttggaaattggccaccaaagtcagtcataatctgctgggctgcagcctgcatattgcgaactcgagaataatagcccaagccctcccaagctttcagtaaactctcctcaggcgcagttgccagactttcgacagttggaaaccagtccaaaaatctttcgtagtaagggataactgtatccaccctggtctgctgaagcatgatttcagatacccagatgtgataaggatttttacttctcctccaaggcaaatctcttttgttttcatcataccaagcgagaagtttctcacggaaagaaatgactttctcctccggccacatgacgataccgtattctttcaaatctaacatatctctagtataacacagaaggtttcacctgtctttgtatctgatttataatattttcaatagatagtatataacttttctatctacttatactcaatgaaaatcaaagagcaaactaggaagctagccgcaggttgctcaaaacactgttttgaggttgtggatagaactgacagagtcagtatcatatacctacggcaaggtgaagctgacgtagtttgaagagattttcgaagagtataaatcttattgatgaactgcttgcagtctgagaaaaaatgagcttggatattatttccaaactcacttaaagtcaatttcaatccactagaacaagcctagtacagttccatcgctttcaacatccatgttgagagctgctggacgttttggaagacctggcatggtcataacatcaccagttaaggcaacgatgaagcctgcacctaattttggtaccaattcacgaatggtaatttcaaagttttctggtgctccaagcgcatttggattgtctgagaaactgtattgagttttagccatacagattggcaatttgtcccaaccgttttgaacgatttgagcaatttgtgtttgagctttcttctcaaagttcactttgctaccacgatagatttcagtgacaattttttcaatcttttcttggacagaaaggtcattatcatacaaacgtttatagttagctggattttcagcaattgtcttaacaactgtttcggcaagtgctactccaccttctgctccatcagcccagacactagccaattcaactggtacatcgattgaggcacagagttcttttaaggctgcaatttcagcttctgtatcagatacaaattcgttaatagctacaactgctggaataccgaacttacggatattttcaacgtggcgtttcaagttagcaaaacctgcacgaactgcctctacattttcttcagtcagagcgtctttagccacaccaccattcatcttaagggcacgaagggttgcgacaataacaactgcatctggagatgttggcaagtttggtgtcttgatatcaaggaatttctcagcaccaaggtccgcaccaaaaccagcttcagtaacagtgtaatcagccaagtgaagggctgttgtcgtcgccaaaacagagttacagccatgagcgatattggcaaatggaccaccgtgtacaaaggcaggtgtaccgtaaattgtctgaaccaagtttggcttaatagcatccttcaaaatcaaagccaaggcaccctcaacctgcaaatcacctacagaaacaggcgtacggtcatagcgataaccaataacgatattcgccaaacgacgtttcaagtcctcgatgtccgttgccaagcaaagaattgccatgatttctgaagcaactgtaatatcaaaaccatcctcacgtggaataccgtttagaggaccaccaagaccaacagtcacatggcggagcgtacggtcgttcaagtccacaacgcgtttccagaggatacgacgttgatcaattcccagctcattcccttggtgcaagtggttgtcaatcaaggcagaaagggcattgttggcagttgtaatagcatgcatatctccagtaaagtggaggttgatgtcttccattggcagaacttgtgcatacccaccaccagcagcaccacccttgatccccatgactggaccaagagacggttcgcggatagcaatcatggttttcttgccaatcttgttcaaggcatccgcaagaccaatggtaagcgtcgactttccttcacctgcaggtgttgggttgatggcagtaaccaagatcaatttaccgactggattgctctcaactgcacgaattttatcaaagctgagtttagccttgtactttccgtacaactccaaatcgtcataagaaataccaagtttctctacaacatcaacaattggcttcaactcaatactctgtgcgatttcaatatctgttttcattcaaaattcctctaacctcttatatgataattcattatatcacaaaacaagatttttaacatcctaaaactctctaaacgttcgtaaatatctctgtttttaagacttttagagtcctttcttaaattttatatggctttatagtttgaaactataataaatcttcgtttttaccaaaaatttatcactttcattttacttaccgcttatttttgtgtacaatagtgctatgaaaattttagttacatcgggcggtaccagtgaagctatcgatagcgtccgctctatcactaaccattctacaggtcacttggggaaaattatcacagagactttgctttctgcagggtatgaagtttgtttaattacgacaaaacgagctctgaagccagagcctcatcctaacctaagtattcgagaaattaccaataccaaggaccttctaatagaaatgcaagaacgtgttcaggattatcaggtcttgatccactcaatggctgtttctgactacactcctgtttatatgacagggcttgaggaagttcaggctagctccaatctaaaagaatttttaagcaagcaaaatcatcaggccaagatttcttcaactgatgaggttcaggttttgttccttaaaaagacacccaaaatcatatccctagtcaaggaatggaatcctactattcatctgattggtttcaaactgctggttgatgttaccgaagatcatctggttgacattgcacgaaaaagtcttatcaagaatcaagcagatttaatcatcgcgaatgacctgactcaaatttcagcagatcagcaccgagctatatttgttgagaaaaatcagcttcaaacagtccagactaaagaagaaattgcagaactcctccttgaaaaaattcaagcctatcattcttagaaaggaaaactatggcaaacattctcttggctgtaacgggttcaatcgcctcttataagtcggcagatttagtcagttctctaaaaaaacaaggccatcaagtcactgtcttaatgactcaggctgctacagagtttatccaacctttgacactacaggtactctcacagaatcctgtccacttggatgtcatgaaggaaccctatcctgatcaggtcaatcatatcgaacttggaaaaaaagcagatttatttatcgtggtacctgcaactgctaacactattgcaaaactagctcacggatttgcggacaacatggtaaccagtacagctctagccctaccaagtcatattcccaaactaatagctcctgctatgaatacaaaaatgtatgaccatccagtaactcagaataatctgaaaacattagaaacctacggctatcagctgattgctcctaaggaatccctactagcttgtggagaccacggacgaggagctttagctgacctcacaattattttagaaagaataaaggaaactatcgatgaaaaaacgctctaatattgcacccattgctatcttttttgctaccatgctcgtgatacactttctgagctcacttatctttaacctttttccatttccaatcaaaccgaccattgttcatattcctgtcattattgccagcattatttatggtccacgagttggggttacacttggatttttgatgggattacttagcttgacggttaacacgattacgattctaccgacaagctacctcttctctcccttcgtaccaaacggaaacatctactcagctatcattgccatcgtcccacgtattttgattggtttaactccttacttagtctataaactgatgaaaaacaagactggtctgattttagctggagcccttggttccttgacaaatactatctttgtccttggaggaatcttcttcctatttggaaatgtttataatggaaatatccaacttcttctggcaaccgttatctcaacaaattcaattgctgaattggtcatttctgcaattctaaccctagccattgttccacgactacaaaccttgaaaaaataaaaacaatctccgctttcaaacctgaaggtggagattttgctctatacagtttctttttaatgaaatctttactatagtaaaacgaaataagaacaggacaaatcgatcaggacagccaaatcgatttctaacaatgttttagaagtagaggtggactattctagtttcaatctactataacttttaactaaaaaatgatctataaacccaagtaaattcttgctttattgtctggtttattgtaccatactagtgtatatgcagttaaaaaggagattcttgtgaatacacggaaaaagacacaatttatgacaatgacagcccttttaacggctattgcgattttgattccaattgttatgcctttcaagattgtcattccacctgcttcctatactttggggagccacatcgctatttttatagccatgttcttgtcgcccttgatggcagtttttgtcatcctagcctctagttttggatttttgatggctggctatcccatggttatcgtttttcgggctttttcccatatatcttttggtgctttaggagctctttacctacaaaaattccccgataccctagataaaccaaaatcttcctggattttcaactttgttttggctgttgttcatgcccttgctgaagtattggcctgtgtcgttttttacgcaacttctggtaccaatgtagaaaatatgttttatgttctatttgtactagttggatttggtacaattatccatagtatggtagactatacattagcactagctgtctataaagtgcttcgaaaacgccgttaaaaggaagaactatgacaaaagatcgcaaacaagccctgctccaactcttgaaagaagctcctaaagccctcaatggccaaagattagctgagcactttcatgtcactcgacaagttattgttcaagatattgcaattttaagagctgatggatctccaattctatctaccaatcgtggttatatctataaagatgctaatgcaaatacttatcatcacaaattatttaaggtcaagcatgaagttgaagaaattggacgagaattacttgctatcgtagataatggtggtcgcgttcaaaatatcttgattgatcatcctgtttatggagagattgaaaccttactaaaactgacctgtcgccgcgacgtgcaacattttctagaacaagttgaacgttctgactttaagccaatttctgagttaacagatggtattcattatcacctagttgaagccgagacacaacaagacctccactatatcgaggaggccttggatcagctaggttatttagtaaaagactagaagattttcttttcccaatcgtcttctgtacggcgagggtagaaaaactctgacttgtcgggagcttccatcatttccatcaatggtagcatatcataggccagatttaagtttggaatctggtctttttgcacccaagaaacttctccctcttctgaagattgaagggtaccagagaactcagtcgccttataacaaatgacaatatagcgcccacctgtatctagtggccaatttttaatgccgacaagttgaggattttggatagtcaaccctgtttcttcgtagatttcacgaatgacagactccgcaaaagcctcatcattttctacatgacctccaggaaaggcataaccagaccagcgattgttttcaggggcgcgatactgcatcaccacgcgctgagtttcgaggtcttcaatcagacagatatttgttaaaattgttaattgggaacgggacataaatttactcgctttctaatttattaaattttcagacttggtaccatattagcttttacttttgagaattatttagaatagaataccatccgtttttcctttataggctttccaagttcaagtattttttcttgtccatcaaaagtaaaacccattttttgatagaaagcaatggcgcgcttgttatctttcaatacccataagaaaatttcagaaaaatgattaagatcagtcaaagctgctttcactaacttttgtgcgattccttttccataatagtcttttaaaacatataaagcaataatttcaccagcttgaatagtctcatcacgacagttgccataacttataaaaccaactatcttcacaccatccatcgcaatcaatgtattttctggatacttttgactaaagagtcgacatctttctaatgtcattgtctcctgaaattccgcaggcaaaaggtcatcataagcctctctccacgtttgccagtgaacgaaggatttaccttctatctcttcaggagtttccattgatttgataataaccgtcatttattttctcccagtcttctctcaaaataccatatttaatactgtcaaaatatttaccttgataataacgaacttttggaatatgagcttcttttttcattcttaatttttcagcaagtttcatcataccaatatttcctgaccaagttgtcaaacccagatgctccaactccaagtaatcctgaaacgtcctatctatccactgcaacatagcaactttcccaataccagtgttccagaattttttatcataaataccaattcccaattccatccatcttgtttctttacatacccaataacgcgaaacagtcccaactagtttatcatcaacaaaaataccaaggcgatttgagttgcttaaaatggattctgatttttgtagttcgaattctttaaaatttgaaaaatactgataatcatcataatagggagcatcatactgtttccaaactggattaagctgtgaataagccatttcccataaagacatcaaatcttctttctttaactttcttaaataaatcatactattcccctaatccaaggccttgacttccagcatcatatcacgaatctgagctgctagttcaaagtcaagcacttcaactgcttcttgcatttgtttctcaagctttttgactagttctttgcgctcttgtttgttgaggctattgatatcgacttccttgtcttcttccttagcaactgccttggtcacagcaatcaagtcacggatttctttcttgatggtttgtggaacgataccatgttcttcattataggccatctggattttgcgacggcgggcagtttcatcgatagcacgttgcatagactgggtaaccgtgtccgcatacatgataacatgaccttcgctattacgtgcagcacgtccaatggtctggatgagtccacgttcgttgcgaaggaaaccttccttgtcagcatcgagaatagctacgaggctcacttcaggaacgtcaattccttcacggagcaggttaattccgaccaagacatcaaagacacccaagcgcaggtcacggataatctccgtccgttccaaggtcttgatatccgagtgcatgtacttgaccttgatacccatttccttgaagtagtcggtcaaatcctctgccattttcttggtcaaagttgtgataaaggtacgctcatttttttcaacgcgggcattgatttcacccaagaggtcatcaatctgtcccatagtcggacggacttccacctctggatccaagagtcccgttggacgaatgatttgctcaatcactgtctcggtctgttcattttcatagtcaccaggtgtcgctgaaacgtaaacaatctgatgaacgtgactctcaaactcctcccgacggagaggacgattgtccaaagcagacggcaaacggaaaccataattaaccagcatttctttacgcgaacggtctccattgtacatgcccttgatttgccctatggtcatatgactctcgtcaatcataatcaagaaatcatctgggaagaagtcgagaagcgtataaggaggctctccttcgctccgtccatccatgtggcgagaataattttcaaccccattggtatagcccatctcacgcaacatttcgatatcatactctgtccgctgtttcaaacgctgggcttcaagcagtttaccttccttttcaaagacagctaattgttcttccaactcggcctgaatctttgcaatggcaacttccatgtggtcgtcattggtcacaaagtgtgtcgctgggaaaatcgctaaatgatccacttctcccaacacctgacctgtcagagcctcaacttcacgaatacggtcaatttcgtctccaaaaaattctactcgaaaggcatgttcatctcgggaagctgggaaaatctctaccacatccccacgaacgcgaaatcttccgcgttggaaatcaatatcattacgttcaaactgaatatcgaccaagtcattcaagagtttatcacgagaaatctctagaccaggacggagactaacgacactatcagcgtattccttgggcgaacccaaaccatagatacaagagactgaggccacgacaataacatcattacgctccaaaagggctgaggtagctgagtggcgaagcttgtcaatctcgtcattgacagaactatccttctcaatataggtatcgctagaagggacataggcctctggctggtaataatcatagtaggatacgaaatactcaactgcattttcagggaaaaattccttaaactccccatagagctgaccagccagagttttattgtgggcaataaccagagttggtttattgactttagaaatgacctgactcatagtataggtcttccctgttccagtcgcccccatcagaatctgagctttttctcccccctcaatgttatccaccaactgctcgatagcttggggttgatctcctgatggttgatattttgatactagtttaaattgattatctgtaatgtgattgatcataagaatcctctctccatgtgctattcctattttagcatacttatagtattttcacgaagaaaaggacggaccgaagtcacatcctttcattttctttctttaatttattagcaagatagacaatcagcagtagtaataccagacttgtcataatggaaccttctatgccaaaagaaccacctgatagccaatcttgattgccttgtggtaaaaaggtcatcagagacgttctgacggttgaccactaactaaaatcccaaagagattaccctgagcaaaattccaagcaccatgaatacctgcaacaccccaaactgtatcagttttgagaaggtaaagagccatggcaactccgaataaaaagagatttactagagatagaggggtgagaccagaattgcccatatgaagcagggtaaagaacaggctagatataagaatagctagttttagattggttcttgaggccaattgaggaagtagccaagcacgggccaccacttcttctgctgtcccctgtaaaatccaaaatgggatagtaaagacgacaaaggcaagagaataaggattcaagtgaatggattccaaacgatattgacctaagaccactaaacctaacaaggtcagaagaaaaagtgccaggcctagactaaatcctttcagaagattgctgaggaaattctctctataaaatcccaaggttcgaataggtcttttctcaacttttcttgtccatctgaacacagtgttaagaataaaaccaaaggccagtaatcctaaaattaaacgaaagtcacttgttttatccgtcaagctctgatgcaaggtctgcaagtagcttgcaagattttgaccagcctctccaaaatttctagcaagtccgatgagagctaacaagccaataccatacaaagtaaaagccacaaactctcctatgaagacaaaaacaaaggctaacaaggggcttgtgtaaatgtttaaactcatttttgaagcttggaagtctttaaatattcttttgttcttcatatccccgtcctcttttcttctatatatactattattatagcactttttaatagcaattcaaggaaaggaaaaaatcgatgttatattttctgacacaaaaaatataaaaatttgcctttttttactttttctgatataatgagagaatattcggaaaaggagactaaaaatgaagaaaaaatttctagcatttttgctaattttattcccaattttctcattaggtattgccaaagcagaaacgattaagattgtttctgataccgcctatgcaccttttgagtttaaagattcagatcaaacttataaaggaattgatgttgacattattaacaaagtcgctgagattaaaggctggaacattcagatgtcctatcctggatttgacgcagcagtcaatgcggttcaagctgggcaagccgacgctatcatggcagggatgacaaagactaaagaacgtgaaaaagtcttcaccatgtctgatacttactatgatacaaaagttgtcattgctactacaaagtcacacaaaattagcaagtacgaccaattaactggcaaaaccgttggtgttaaaaacggaactgccgctcaacgtttccttgaaacaatcaaagataaatacggctttactattaaaacatttgacactggtgatttaatgaacaacagcttgagtgctggtgccatcgatgccatgatggatgacaaacctgttatcgaatatgccattaaccaaggtcaagacctccatattgaaatggatggtgaagctgtaggaagttttgctttcggtgtgaaaaaaggaagtaaatacgagcacctggttactgaatttaaccaagccttgtctgaaatgaaaaaagatggtagtcttgataaaattatcaagaaatggactgcttcatcatcttcagcagtgccaactacaactactctcgcaggattaaaagctattcctgttaaggctaaatatatcattgccagcgattcttcttttgccccttttgttttccaaaattcaagcaaccaatacactggtattgatatggaattgattaaggcaatcgctaaagaccaaggttttgaaattgaaatcaccaaccctggttttgatgctgctatcagtgctgtccaagctggtcaagccgatggtatcatcgctggtatgtctgtcacagatgctcgtaaggcaacttttgacttctcagaatcatactacactgctaataccattcttggtgtcaaagaatcaagcaatattgcttcttatgaagatctaaaaggaaagacagtcggtgttaaaaacggaactgcttctcaaaccttcctaacagaaaatcaaagcaaatacggctacaaaatcaaaacctttgctgatggttcttcaatgtatgacagtttaaacactggtgccattgatgccgttatggatgatgaacctgttctcaaatattctatcagccaaggtcaaaaattgaaaactccaatctctggaactccaatcggtgaaacagcctttgccgttaaaaaaggagcaaatccagaactgattgaaatgttcaacaacggacttgcaaaccttaaagcaaacggtgaattccaaaagattcttgacaaatacctagctagcgaatcttcaactgcttcaacaagtactgttgacgaaacaacgctctggggcttgcttcaaaacaactacaaacaactccttagcggtcttggtatcactcttgctctagctcttatctcatttgctattgccattgtcatcggaattatcttcggtatgtttagcgttagcccatacaaatctcttcgcgtcatctctgagattttcgttgacgttattcgtggtattccattgatgattcttgcagccttcatcttctggggaattccaaacttcatcgagtctatcacaggccaacaaagcccaattaacgactttgtagctggaaccattgccctctcactcaatgcggctgcttatatcgctgaaatcgttcgtggtggtattcaggccgttccagttggccaaatggaagccagccgaagcttgggtatctcttatggaaaaaccatgcgtaagattatcttgccacaagcaactaaattgatgttgccaaactttgtcaaccaattcgttatcgctcttaaagatacaactatcgtatctgctatcggtttggttgaactcttccaaactggtaagattatcattgctcgtaactaccaaagtttcaagatgtatgcaatccttgctatcttctatcttgtaattatcacacttttgactagactagcgaaacgcttagaaaagaggattcgttaatggcaaaattaaaaattgatgtaaatgatttacacaagcactatggaaaaaatgaagtcctaaaaggaattacgactaagttctatgaaggagatgttgtttgtatcatcggtccttcaggttctggtaagtcaactttcctccgtagcctcaatcttttagaagaagtcactagcggtcacatcactgtgaacggctatgatttaactgaaaaaacaaccaatgttgaccacgtccgtgaaaatatcggcatggtattccaacacttcaacctcttccctcatatgtctgtattggacaacatcacctttgctcctattgagcacaagttgatgactaaggaagaagctgaggaattgggaatggagttgcttgaaaaggttggactagcagataaagctaatgccaatccagatagcctatcaggtggtcaaaaacaacgtgtggccatcgctcgtggcctagcaatgaatccagacatcatgctcttcgatgaaccaacttctgcccttgaccctgagatggttggagacgtacttaacgttatgaaggaattggctgagcaaggcatgaccatgattatcgtaacccatgagatgggatttgctcgtcaggttgccaaccgcgttatctttactgcagatggcgagttccttgaagacggaacacctgaccaaatctttgataacccacaacaccctcgtctgaaagagttcttagataaggtcttaaacgtctaaactcaaactgtaaggatttccttgcagtttttctacctcgtattggaatttttgatttttcggaaaattatgttagaattaagtttatgaaatgaggtttcctcatacctagcaagactaggaataaaaatagaaattaggtagctagatgtcatctaaggttattgttacaattttcggtgcgagtggagacctggctaaacgcaagctctacccttccctttttagactatatcaatccggcaatctttccaagcactttgccgttattggaactgcccgtagaccttggagtaaggaatattttgaatctgtagttgtcgagtccatccttgatttggcagatagtaccgagcaagcccaagaatttgctagccacttctactatcaaagccatgatgtcaatgattcggaacattatattgctttgcgtcaattacaagctgagcttaatgaaaaataccaagctgaacacaataagctcttcttcttgtctatggcacctcagttctttggaaccattgccaaacacctcaaatctgaaaacattgtcgatggcaaaggttttgagcgcttgatcgttgaaaaaccatttggtacagattacgcaactgcaagcaagttgaatgacgaactcctagcaacatttgacgaagaacaaattttccgtatcgaccattatcttggtaaggaaatgatccaaagcatctttgcagttcgctttgcaaacttgatttttgaaaacgtttggaacaaggattttatcgacaatgttcaaattacctttgcggagcgcttgggtgtagaagaacgtggtggctactatgaccaatccggtgccctccgtgacatggtccaaaaccacactctacaacttctttcgctcctcgccatggacaaaccagcaagcttcacaaaagacgagattcgtgctgaaaagattaaggtctttaaaaacctctatcatccaactgatgaagaactcaaagaacactttatccgtgggcaataccgctctggtaagattgatggcatgaaatacatctcttatcgtagcgagccaaatgtgaatccagaatcaacaactgaaacctttacatctggtgccttctttgtagacagcgatcgattccgtggtgttcctttctttttccgtacaggtaaacgactgactgaaaaaggaactcatgtcaacatcgtctttaaacaaatggattctatctttggagaaccacttgctccaaatattttgaccatctatattcaaccaacagaaggcttctctcttagcctaaatgggaagcaagtaggagaagaatttaacttggctcctaactcacttgattaccgtacagatgcgactgcaactggtgcttctccagaaccatacgaaaaattgatttatgatgtcctaaataacaactcaactaactttagccactgggatgaagtttgtgcgtcatggaagttgattgaccgtattgaaaagctctgggctgaaaatggtgccccacttcatgactataaagctggaagcatgggacctcaagccagctttgacctacttgaaaaattcggtgccaaatggacttggcaaccagatatcacctatcgtcaagatggtcgcttagaataaaaaaatttcctgcaagtttatgccttgcaggatttttgcttctgattagattaaaccttccaagagacctttcataaagttttctgagttaaactctccaatatcatcgattttttcaccaaaaccaatcaattttacaggaatattgagttcttcacgaatggctagaaccacacctcctcgagcagttccatcaatcttagtcaaaacaattcccgttaaaggtgtgattttcgaaaattctttggcctgtactagggcattttgacctgttgatgcatcaagtgccaagaaggtttcatgtggtgcttctggcacaacacgtttgataatacgaccaatcttttccaactcagccataaggttatccttattttgcagacgaccagcagtatcaatcatgagaatatcgataccttcagtcacggcacgttccataccatcaaagaccacgctggctggatcagctttttcaggtccagttactactggaacatctactcgtcggccccattcagctagctgagctactgcacccgcacggaaggtatctgctgcaaccagcatgaccttcttaccagcttgtttgtagcggtgggctagttttccgatagaagttgttttcccaacaccattcacaccaacaaagagcataactgtcaagttatcttggaagtggatgctttcatcgtagctaccatccttttcataaagctcaaccaatttctcaatgatgacacgacgaagtacatcaggtttcttggcattttcaagcttggcttcgtaacgtagttcctccgttaagttagaagcgacttggacaccaacatcactcataatcagcagttcttccagttcctcgaaaaattcttcgtcaacagagcggaagttagcaaagaaggcattcaagcgggcaccgaaacctgtgcgagttttcttaagactgcggtcatatttttcctgaacagtttcttctgtttgaggagcttctggttcaagcacttcagaattattttcttctacagttccttcgtgctcaagcttctcttcctctggtaattcttctgagtttggtaattcttctatttcttcttgagaaacccctacagctggctctgaatcctgactttcttcaactgtgtcttggatttcctcttcttggaacacagcttgttcaacaatttcaacctctgcttcttcctgagaaacttcctcaacttctgtgaaggtaggatcaacatcttcagacaaatcaagattttccagagcttcttttacaacttcttcgattttaggttcttctttttttccgaatagacggtcaaacaatcccatatcttagttctcctttagcacatattcttcgatagcccaggcgacagcttcctcatcgttggtcatcggcgtcactacatttgcggctgcctttacttcaggaacagcgttttgcatagcaacaccaagacctgcccattcaatcatagagaggtcattggcctcgtcaccacaagccatcacttgactttggtcgattccaagatggctgattagttttgccaaacctgttgctttatgaacattctttggtgaccattctagcaacatttcacgtgatttaaagatttcatattggtcaaacaattctggagaaatcttctgaatggctgcatccaagggttcttgagcaaaggcagtcacgcatttgttgtaggtcatttgactagataagtcttcaaagtccactggaacaaaggtcaaagctggattgaatttggcataaagactttcttggtccgattggatttgataaactgttccttctgagatggcatcaagaggcagtgataatttctctgtttcttcatacaaacgtgccacatcatcatatgaaaagactgttttatcaaggatttctcctgtatttttctgaactaatccaccattaaaagtaatggtatactcatcttcctgaccgtcagtccctaactcatggagaaagaaatccatggcttttaagggacgaccagttgtcaatacgaccttgataccacgatcacgcgcagcttgcaaggtttccttggtacgatccgtcagccttttatcagtagtcagcaaggtcccgtccaagtccaatgcaatcaattttatatctgccattataagccctccatataagctataaccgaccgttccttatggtgaccaatcacagtctttgctaattctaaaatttcaggtcgtgcattttcaggagctacaggatgtcccacaacctgcatcatatgtaagtcattaagattgtctccaaaagccatgacctgatccattgtgataccaagttttttaactaattcaacaatggccactcccttatcgacatagtccagaacaatatcaatggattcaaagccagttgtcatggccttaacaccaggaacgttttcgtttacccaagcctccccatcttccagcgtttcttctgtgaagttggttgtaaatttgaaaatgtcatctgtgatatcttccaaactcgctactttttggatattttcattatagtgctgactcactttcaaataggtctcatcaaccgtatctagaacatatgaacccttcttacccgtcaagagcagtttattgatatctacataaggtgaagttttcagcttttcaaaagttgccagataaaagtcacgagacatagtcgcttcatacaagtcctgaccttgatactctaccaaactgccattttccgcgatgaaaataatgtcatcacgaacaccagcaaataatttttctagagacagaaatccccgacccgaagctaccgcaaagtaaatccctttttccttgtaggaaaccaagagagacttgagacgatccatatcaaagcgtccattcccatctaggaaggttccgtccatatccgttgctactagtttaattgtcatccttcaatactttctaaatcttttaacttaactgaaacaatctttgaaacacccgattcttgcatggtcactccatagatggaatcagccgctgccatggttcccttacggtgggttacgacgatgaactggctgtccttgtcaaagcggttgaggtaatccccaaaacgtttaacattggcttcatccagcgcagcttccacctcatccaagataacaaatggaatagtcttgacacgaataatggagaagagcaaggcaagagccgatagggctttttcaccaccactcatgagattaagagactggattttcttgcctggtggttggacagaaatttcaaccccagctgtcagcaagtctccttcagtcaaaatgaggtcagcctgacctccaccaaacatctgcttgaaggtcactttaaaggactcacgaatgacctcaaaggttgatttaaagcgttccttgacctcatcattcatctctgtaatggtctcaaggagcaggtttttcgcagacaaaatatcatcacgttggctatttaggaaatccagacggttgtgaacttcttcgtactgttcaatagcgtctaaattgacaggacccagtgagcgtatagccttctctaaatccttaacttcttgctctgccagattgagattttccaactcatgcgccttttctaaagcttctgtgtagctgatctggtactggtctgttaattgactttgtagatggcgcaagcgctcgctaaccttttctttcttggcttcagcacgagtttgcttgcgaatccactcttcattctgctggcgagcctgatccaaatgactagcaatatcatccagttgaccctcaatatcatccaactcaaactgcttgcgaatcaaaccttgttggagatttgttttttgagttttggattcttccgcctgttgactgagcaattctgtatcaaccttctcaagattatcaatcttttcttgaagaaggcgctggatttcctcttgttcaaaatcaagattgtccaattccttgcctaagcgttcaatatcagcaacttcataacgtttttgcccttgcagttctgtcttaagcaaacgagcttgcgctagctcttcctgcaagttttgatagcgttcttggatggcatttttgttagacttaatctcttcaatctcagcttccagattttgcttgtcactggagattgcagcaagacgctcttggcagttttccttatccgcttgccaatctccctcggaaagacgatctatttcctcttcttggagtttccaaagagtttccagttcttcaacttgctgactagtttgctgataagcgaggaacaagccttgctcctgaatacgtgcctgctctccttgagatttaatagcttctaatgactcggtcaatctggccatctcatcttgcaaggtcttcaaagtcgcctcttctgaacccaagcttgcttcttcttcagcaatttctttttgtaattgctccagttctggcttgataaaaatgctgttattctggcgattggcaccacctgcataagaaccacctgtgcgcaactctgtcccatccaatgtcaccatacgaacctgataacgaacttggcgagctgctgcacgcgcatgttctacggtatcaaagatagccgtcgtagctagcaagttcttgaaaatggcttccagtctagtatcaaaagtcaccaactcatctgccatcccaaggaaacctgggcttacagcgatagcatcttggttctgactagaaatcgtacgcgccttgatagtggtcaaaggaagaaaggttgcacgaccggctctgttccgtttaaggaagtcaatagccttggttgccgactcttcatcttctacgatgatatgctggctacttgcccctaaggcaatctctagggcagtttgataataaacatcaaaggtcagatgctcactgactgcaccaataatcccacctaggcgatctttttcttggagaacactcttaacacctgcataaaagttactatgatttctcaggatattttccaaactttgagctctggcctgcttgtttttgagattatccagacggtcaaagagttggctttgttgagcttgataggaagttttctgctcctcttgctccttggcaatagcttggtagtcagccaataatttctgaacctgctccttggcagtttcaagctcttccttttgctgactagccttctctttagctatagctaattgctctttcagcttttctagttgatctgcttgtttttgagaaagctgacgactattttccaactcattctcaatacgggtcaactggtttgagacatccgcttcttcttgtaaaagagctacaaagcgttcacgtaagagctcaatcatctgatcaggatcgtctgagaaagccagcaattcagcttctaaacgattgagtttttgattattttggactagatttccctctaacagagctaaagagctttctttatcagacttttctttgctgagtgaatttctcttatcctccaaagcagccaaacgggcttgtgcctcctgttgattcaaggccacttgctcggactccagtttcgatagggctaattttctttctaaatcactaatcagactagtcaagtccatcaaactgccttggtctttggccatttcagcctgtaaatcttggcgttgctttttaagagtttgattttcttcttctaatttttcacgcttttggtaataactcatcaagagttcttgaacctgagtcaactcttcttctgtcgactctagttcagccttattttccttgatttgagcaaccagaacatctaaataaatagccttacgttgtccttccaagtctaaaaacttacgggcattctcagcttgcttctcaagaggcttgatttgattatccaactcgtagataatgtcctctaagcggtccagattatcctgagtttgctgcagtttactctcggtttcttttctgcgagtcttgtattttaaaactccagcagcttcttcaaaaatagctcgtcgttcctcaggcttggaattaaaaatctcctcaaccttcccttgggaaataatagagaaggaatctcgtcccaatccagtatccaagaagaggtcatgaatatcacgcagacggactttcttgccgtcaatcttgtattcgctatctccactacgatagacatggcgttccaccctgatttcttgacctgcatccttgataaatccgtcatgattatccagagtcacaactacagaagcataattgagcggtttgcgactttcggttccagcaaagatgatatccggcatcttgcccccacggagactcttgacactagactcccccaaagcccaacgcagactttctgtaatattggactttccagatccattgggtccaacaactgccgtcacaccttggtcaaaaacgaccttggtcttatcagcaaaagacttgaacccctgaatttcgatttcctttaaatacatgaatccagccccttctcaacggcatttttggcagcttcctgctctgctaatttcttagaacgaccttggccttgaccgatgctcttaccttcaacaagaacttctacatcaaaaaccttatcgtgagcaggccctgtttcagaaatcacctgataacgaatagccacatcaccattgacctgaagcaactcttggagatgggttttatagtctgtaatcatctcaaactcgcctgcttcaaccttaggaatcatgacttgatagataaattccttgaccttggccacatccttatccaaaagaagggcaccaagaaaggcttcaaaggcatcaccaagaatggtgtcacgattgcgaccacctgatttttcttcccctttacccaacttgataaactggtcaaactggcaatcacgcgcaaaaccagctaaactctcctcacggacaatcatagcacggagttttgataggtcaccttcaggctttttaggatattttttatatagatattctgaaatcaataactgtagaacagcgtctcctaaaaattccaagcgttcattgtgtgaaatttttaagaggcggtgctcattggcataactcgtatgagtaaaggcagtttccagtaactttttgtctgcaaattcgattgcaaaatgattctttagtacagtttgtaattctttcataccaacctctttctaactgataatagtcctttttattatatcaaaaaaagccccctgagtcactctaaaacgggactggaaagcatttgggaattctttagacagagattctcagttttagcggcaaatttgggtcaggataaagaaaaaagccctattaaaggctttttaggatgtttacatccaccctgagggaatcgaacccccatctcaagaaccggaatcttacgtgatatccattacactaagggtggaaacttgttttattataacagaaatttgctctaataacaagttttttggtcaaagaccccgtcttagtgggaagcatccccattccagatggagtttttcacgatcacataatcaacgtgtttaaggtcagcaacctgacgtccacctgcataagaaatagcactttgaaggtcttgttccatctcagttaaagtgtcttgcagatgacctttagcaggaagcaagatacgtttgccttccacatttttgtaagcacctttttgatattgtgaggctgaaccataatattctttgaactgttcaccatcgacttcaatcgttttccctggactttcaatgtgtcctgcaaagagggaaccaatcatgatcatgctagcaccgaagcggatagacttagcaatatcaccgtgagtacgaattcctccatcagcgataatcggtttacgcgcagccttggcacaccagcgtagagcagccaactgccaaccacctgtaccaaaaccagtcttaaccttggtgatacaaaccttaccaggaccgattccgaccttagtagcatccgcaccagcattttccaattcacgcacagcttctggtgttcccacatttccagcaatgacaaaggtatctggcaattctttcttgatgtgttgaatcatagaaatcacgctatccgcatgaccatgagcaatatcaatagtgatatactcaggagtatcagccttgagctggctaacaaaatcatactcataatccttaacaccgacagagatagaagcaatgagcccttgattgtgcattcgtttaataaaaggaatgcgtcctgcctcatcaaaacggtgcataatgtagaagtaaccacctttagccagttgctctgctacattttcatccaaaatcgtctgcatattcgctggcacaacaggtagtttaaaggtgtgatttcctaaagtgacacttgtatccgcttctgcacggcttttaatgacacatttatttggaatcaattgaatatcttcgtaatcaaaaattggaaattcatttaacatatcgatgtctcgtttcttttgtaatgacctacctatgctcttgcatcactacgccttttccgacgtttccttaatttattataaatcaaagtacagtttttgtcaaattattttatgaattaaaatatatcgttcgggttttacttgtgttaaaaataaaagaaagaggggaaattattttctccccacttcttcatcaataatcgctttaaaattttcttctgaattttccatcattttacaaaatgtactatagaatgaggcattctgagggattcgaatagaccacttcttcaattgagctccatagccagctacttttcctatttcactatttactgactgctccatactaggaaaaatcagtccagccttctcagcttttaaaatataagaataggaaatcagctggaataagtcctcacggttgattcctttttcagtcaattccagttttttatattttgcatctagaacaatctttcgttctctgtcataaaaatctggatatacttttcgtttcccaacagaaaatactgaaattccatccgtcttatccttatttctgggatgtacaaaaccttttggcaacaaggtgtaaacatactcttcccaaagccaggcaacatcaaagagaataccatagattttttgatcttgataccctaaaccgtgcttttcttggtttaggatcatcagacaaagttcttgtaagtttctgtactcgtgaaagtatgcatgacgtataggtttagattgatttccccgaataatcttagcacgatcagctagtttataagagggcgttacacgcacgatttcagatacgttttcacgactagttgagagattatctagtaccccttgaccaatgcttttctgattcttaatgtattcaatagtgtgacggaccaactgcatgaggggattatcataggtgaactctctcgttgcgtaggcaatatttcccgtgaaaggaagatttttcttgagatggtttcttacatcaatcactcccttaacatgactgtcgttatgagaaaatcgatgatattccttataaagaccttttcgaatagcagcttgtagatacttgggaaagagatacaccaaaagttgataaagcctctcttcacgagacaaagcaacatctaaactagtgagattgatatgaagaaccttgtttaagagataatgcaaaaagtggtcattactctcatcagaaaatcgtgaggaaatcgttaatctttcctgaccatatccaagaaaaccaatcacgttccctgtcttgattttctgattgactgtttcaaaaatcttttggtccttatccaaatcaggagtatgagtcaaatcatttggaaaaatgaaaatacgttcatcttgggatagactttccaaggttctgtctaaaagaggattgcttagtttaggatattcttcaacaaatttttctttaataatcttgtgttgattatcagtaatccgcatcatcgttttcatcgccttcattgtcatcagctactgcctgatctttttgctcattatttgtcagatcaaatgcttttttcaaagtttccaaagtttcaacctcatcataagaacctcgcaagtagtcttctaggagaggcttaatataatcagaccagagtaattcatagtcaaaatctacatccttcaacttaagaaaataacttggtccaatatgataatgactgtttaattcctgaatattttcgatagcagcgttcaagtttcttagacgaatttttgcttcttctgcatggatattcaactctttatccaacatgccagcttgaccctcgacagtaacttcaacaaaacgaaaacgacgacgcatagcaaaatcaaaggtatccactgaacgatcaatatcattcatagttccgatgatgtaaacattttcggggatatagaacttttcatcagtttcgtgtagatttgcatattgggtagaaacacttcctttttcaccacgatagccggggtcgatagagaaaaagagttcgccaaaaatcttagaaatctccccacgattgatctcatcgatgatgaagacaaaattcttatcagtatcaatttctgttggggaaacatagtctttcaaaccaaatctctttctcaatgtttctaggacagtttttccaccacttttgtagtattcttgcttattataatttttatctttatacaactcgtaaacatatttgctaggtagtgaccatcctggaacaccactatcataatttactgacaaattttgtctactattaacagataagtaagatgtttttgttatatattctttttcttcagcaacatttatatattctaagtaagaatcccaagcctcatcaaaattatcttgtcctccaatcaattgggtttcttttgctttctgacaaaaatctttaaaaataccgtcctgtagcctaaactcaatagctccatccccatttgatactggtcttaaaccttctacaaaatccgtataatcatatgatgggtgaaattgtacaaatccgatttgatcttcgttgccatccgttaattctttagcaatttctttagcaagataagtttttcccgtgccaggagcaccgcggaggatgaggtttggagactttaatagagattgagttaattgatgacgaaaattgtttgatgaatccattgtactattgtcttccttattttccataaaaagcttagaatactcaaaaagcatagttcctaatttcgatggctccaactcaggataagttttggacaccagttcaattattttatgattttgcagataaggtccaccttgatttgtctgagaaacaaagtggttccaaaattctttctgactattaatatttacaccaaagaaaggatctccctcagtatagatacaaagtaattttgtcaccatagcagaacgaccaataaattcatttgttgatcttttcatatcaaaaataggattttcaaagttaaaacgaataccttctttgataatttcatacaaatctgattttaattttgaaaatcgctgatccaactctgaaatctcattattagcttgatctttatatttgtttgtttttttattccaataaataccaaattttgaagctgagccaccagaaattccaagaaatagatttttgtattttcccttctcaagagcgtagcataaagacttattttgctgtccctttcctattacatattcatcgattgacattgttaaaatcctatccaaaggccattcctggagaaactcttcttttaatttatcattaaacttttcaccaacagttgccttatttaataactcttctttatttagactataccatttataaaaatcttctaaactaacttttcttttattcatcaatctaactccttttactaatgatgtttaaatattggcattacttattaacatatattttctacatagaataccatatcctatagaaaaagaaaagaaattctaaacaaaagcccagtgttaggagctttaatatctcataacactagacttcttctctatcctaataatactcaacctgacggtagtcccatgagttaaaagtatctgacaggtgcatcatgattttatcaatgtcaagccctttacggatcacaactggagctggtgaagttgaacgtgctcctccttgttctgggatgagtttgccgtccttatcgaccatagacaccattacaccttgctcatagcgagtttcaatcgttttgtcattgaagcagatgaggcgtagaccattttaccttcttcccaaagcttggcagccaattgttcacctgcttttccaaacttgataacaaaacagctagtaccacgtacatcagtaataagttcttcacggccatccccgtatgctttgagtttttcaaaggcttctggtttccaaggaaggatacaaccaagaagaatatcttcatcccaatgtttttagtagaatgcttcaatttctgggttgagttgcgctaaagcgcaaagttcatccatgctaccgcagagaacaacacctggtttgttacgcttacgttctttggctgcgaacttacgctcaagtcctgccttgtcactggtcatgataatgtaaccaactttagtagggcaaacgatacatccgccctcaccttttaaaatgtcgtagccttcttgtgaatgtgttttgtcataattttataatgtgttgaatccagaatagtccactgtagtttctaaaaaattgctggaaatggatgttaagctccaattcatttgtttacatcttatttcagtttactatatctccttttctattttttctaatcctgccagtaggctggtcgttgtttttcataagcagcaatcaactcttcatactgcaaggtaataccgatatcatccaaactatttaggagtttatgtttccactcgctatctatctcgaaggtgaattcttcaactggtgagatgattttttgttgttccaagtccacagttacctggtcggttggttttagctgggctagtttctctctaacctctctaggctgaacgattggcaacatgccattattgagttcattattgtaatgaatgtcaccgaaagatcctgcaatcacgaccttaaaaccatagtccgctagagcccaagcagcgtattccctcgaagaccctgccatccattacctccaaataaaatataaggctactagtgtggtcaccatcccaagaaaccaaactattttaaagtaccattttcgagtcttgtggtgaaagatgattcctgctagccaggcaccaaaaccaccaaaagtaaaggctaaaataagtaagattttctcagggatgcgccaaactcttctccttgccttagatttgtcaataccataaatcaagaaaatgatgacattccaaatcaaaaggactagagtaattttttcgtctaacttcataaccttgcaataatagcttccgtcatttcctttgttgaagcctgacctcctatatctctcgttaaaattcctgccgccagacttgtctcaacagcacgtttgatacgctctgcatcctcataacgtccgaaactatctctcaacatcatggaaactgataaaatcatggaaataggattggcaattccttgacctgcaatatcaggtgctgaaccgtgaataggttcatagagacttggtccattttcagaatgactggctgatggcataaccccaagtgtaccagataagacgcttgattcatcagataaaatatctccaaaaagattctccgttacaataacatcaaacttagcaggattggtaatcataagcatagcagctgagtctaccagctgatgttccaaggttacatctgggaaatcctgtgcgacttcctcagctactttccgccagagttttgaggtcgctagaacattttgcttatcgatactagtaacgatttttctgcgatttcttgcaatttcaaaggctttgcgaataatccgctccacttcctcatagctatagtcgttgatatcacgcgcattgcgctcttcaagaatatgatatccaaagtaaatcccgcctgtcaattcacgcaccacgacaaagtctacaccagcaattcgttccagtttgagtggtgacaaatgcttgagactgtcaaagatttttacaggacgaatattagcgtaaagattgagttccttacggagagccatcaggccttgttcagggcgaaccactgctccatcatactgaggactaccgatagctactagtaggatagcatctgcttccctacttgccttaagggtttcatcaggtaagggaggtcatgctgcatcaatatctgcacctccgaacggtcgtctgtcaatctcatagtcaaaacctgttttttcagctagagcctccagaacttctaaaccaacctccatgatttctgggccaattccgtctcctgctagagctactattttctttgccatagccttctcctttacacactaggcatatcgtggtaagaaacactgcgtcccatctcacctgcattctctttttgaacaaaggtattagcgtttatatagacaatagcagaagccttcaacacatcaaaatcaagccctgctgcattaaagatggtttctgtatctctgttttcaacagtgaccaaaacccgatcctgggtatcgattccatctgttaccgcatcgatagtgtaggacaccaaacgaacagattggttaaagaacttatcgatagcattaaagattgcttcaacggaaccttgccctgtcgcattaaattcgactttctcaccatccatattggctaggctaacgagcgcttcaatgtcattatctgcatgagtttgaagttgtaaatcatcaaagtggaagccttctggattttcaaccatggttccagctaccaaagctcgaatatctgcatctgtgatttcttgcttcttatcgaccagtgccttgaacttagcaaagagtggtttgatatcctcttctgtaaaatctagggccaattctctcagtttctcaacaaaagcatggcgaccagataattttccaagcagaatcttaacaccaaccaattcaggtgtgatgatctcataagtgagaggatttttaaggactccatcttggtgaataccagattcgtgggagaaggtattgccaccaacgacggctttgtttttaggaactggaataccagagaagcgagaaaccatttctgacgtattgatggtctcatttaggacaatactggtttctacttggtagtaatcttggcgaatattgagagccactgcaatttcttccaaagcagcattttcagctcgctccctaataccattgatagtcccttcaacacgtcctgcaccattcttgacagcagcaaggctatttgccactgccattccgaggtcatcatgacagtgaggcgaatagatgatctgacgatccgtcttgacattctcaatcaggtatttgaagatggcaccatattcctctagtgtggtaaatcctatattttctaaaaatctcttcagtaaagaatatttagctaattgaaagttcatgaaaattattaaaatatttcattttttagaggttaagttccaacttttttctatcaattccagtacttcttcatctgataaagtatcatcaagggacacactaatccagtagcgcttgctcatatggaaggctggataaatccccttttgtgaaagcaaattagctacttggtcatgcttgaggttgactgcttccacttgtccttctctgcccttttccagcttattccaagagattttcatcaagacggcataccacttttgattgccttcatggcgcaatacagctgtatcaggcgatttttcccacagatactccaactggtttccatacttttcctgaacttgagtcatgatacgcttagtctgatgacagataaaatcttgcacatcaaaacaagccttccgaatctggtaaagaatctccagacaagcctcacggacatttccgacaaaacttcccctcatgctttccatataaacgtgaggatagaggtcaccagtctcttggtcaaagacttgaaagttcacattatcagcagtgatggacacagtcatgacaaagtcaccttgcaaaatctggcaactatatgtccagacttcgctattttctataaaaccataatcatgagccttttcttgattaaattgataggatttaaaaatttcaaacataagtgaaaactgctacccaaagctagcagttcctttctattttttaaaaaacaaccttagtaccatgcaattgtgttacccccacctggtcgataaaggtttgacggttttcaaggtcaatccccccacctggtagaatttcaattttacctttagcgtactccaaaattctgtgatagtgaacaaaacgtttttctaaggagtcgccagacacaccagcacgagttaggatacgagtgacaccggcttgactgagccagtcaatagcttccgcttgatcttcatcacttagttcatcaaaggccatgtgaaagacaatttccattccttttgatgcagcaattaacttttccagattaggcttatccaactttttatcagcagttaaagctccaaatacaaccccttgacttccagcctgagcagtcaaacgaatgtcttctagcatgatagcaatttctaggtcattatagacaaagtcaccaccacgtggccgaatcatggtcatgatggttgtatcgtagttagctgccagttcaaccgctgccttagtcactccatagctgggtgttgtcccaccaactgctagattatcacagagttcaatccgacgagctccagcctgcatcgctttttcaagtaaagtcacattttcagcacaaaattcgtaaatcatttgattctccttgaatattacttcaattttattatatcatattgttatgaatatgctttcaattttatcaaggcaaataactactgttttaactattctttgtctggaatgaccttgaagagataataagtaataaagatggtcaaagcacccagaccgattttgactggtaaaagaggtgcaaaataaatagaaattcccatcaagacgtagatagagacgatgatttttttctttcgttcacgcgcaatagacttggtctcacgaaaatcagctacatatgcttgatagagcttggtatgataaagccaatcttcgaatcgcttggaacttctggagaaacaagcaatagacaacaaaaggaaaggtgttgtaggcaacaagggtaaaacaaccccaacaatagccaaggtcagcgataaaaaaccaataattagatagataatacgcataacttctcctagttaatactcttcgaaaatctcttcaaaccaggtcagcttccatcttcaacctcaaagtagtgctttgagcaacctgcgactagctttctaatttgctctttgattctcattgagtataaaataatcttcttctagtttcgcataaaatgatgttttttgtcaagttctaaccaaaaggagcctgaaatttactttcgggcccctcctcttatttaatcttttcggttctataatatttgtagtgggtaaatccactatagatattatggagcctattttattgtagaaaaaaagtcccatatgacctataatgaaaagcgacaaaacaactcattagaaagaatcatatggaacaattacattttatcacaaaattactagacattaaagaccctaatatccagattttagacatcatcaataaggatacacacaaggaaatcatcgccaaactggactacgacgccccatcttgccctgagtgcggaaaccaattgaagaaatatgactttcaaaaaccttctaaaattccttatcttgaaacgactggtatgcctactagaattctccttagaaagcgtcgattcaagtgctatcactgttcaaaaatgatggtcgctgaaacttctatcgtcaagaagaatcaccaaatccctcgtatcatcaaccaaaaaattgctcaaaagttaattgaaaagatttctatgactgatattgcccatcagctttccatctcaacttcaactgttattcgtaagctcaatgactttcactttaaacatgatttttcttgtcttcctgagattatgtcttgggatgagtatgcttttacaaagggaaagatgagcttcattgcgcaagattttaacaatctcaatatcatcactgttcttgagggaagaacacaagctatcattcgaaatcactttcttaaatatgatagagccgtccgatgtcgcgtcaaaattattactatggatatgtttagtccttactatgacttagctagacaacttttcccatgtgctaaaatcgtgttggatcgctttcacattgtacaacatcttagccgtgctatgagtcgtgtgcgtgttcaaatcatgaatcaattggatcgaaagtctcatgaatacaaggctatcaagcgctactggaagctcatacaacaggatagtcgtaaactcagcgataaacatttttatcgccctacttttcgtatgcatttaaccaataaagagattttaaacaagcttttgagctattcacaagacttgaaacatcactatcagctctatcaactcttgctgtttcactttcagaataaggaaccggagaaatttttcggactcattgaggacaatctaaagcaggttcatcctctttttcagactgtctttaaaacctttctaaaggacaaagagaaaatcgtcaacgcccttcaactacactattctaacgccaaattggaagcgaccaataatctcatcaaacttatcaagcgcaatgcctttggttttcggaactttgaaaacttcaaaaaacggatttttatcgctctgaatatcaaaaaagaaaggacaaaatttgtcctttctcgagcttagctgacttcaacccactacagttgacaaagagccatcttttcttcctcgtagtcgcctttgctacaaacaacctgcttgccaccaccacggacttttttctccatgaggaagttgccacattttggacagtcacgaccaacaggcttgtcccaagaggtaaattcacattctggatagcgattgcaaccatagaataggcgattacgcttggtttttcgctcaataatttgtccctgatgacagcttggacactcaacaccaatctctttcacgattgcttgggtatgacggcaatctgggaaattgctacaagcgtagaatttaccaaaacgaccaagtttaatgaccattggactgccacacacttcacagtcaaatccagctggttcatccttaatctggattttttccatttcttcttcagccttggcaacttctttagagaatggtttgtaaaaggcatcaatgacccgtcgccactgctcttttccaacttcgacatcatccagtttaccttccatttcagctgtgaaggtcacgtttacgatatctgggaaatattcaacgatgagcttattgacaatttctcccaactctgtcggttcaaaacgtttggctgccaggcgaacataataacgtttctgaatggtttcaatggttggcgcgtaggttgatggacgtccaaccccattttcctctaaggttttaatcagtgttgcttcagaataacgggcaggcggttgggtgaaatgttgctctggtttgctattgacctgtttgaccacatctccaacaaccatgtccggtaacatcttattcttgtcagaatcattataaatggcaagataaccatcaaacttaacctgactaccattggcagcaaattgaacccctttttgagacaatttaacagccatggtatcaaaaacggccgctgtcatctggctagccacaaaacgattccagataagggtatatagcttaagctgatccttgtccagatacttagcgatgctttctggtgtattaaagacacttgacggacgaatagcctcatgggcatcctgagcacctgatgcgtttttgaccttgctaccgtgcttagaatacttgctaccaaaacgatccgtaatgaagcttgccgcctcattttgcgctacaggactgatacgagtcgaatcggtacgcatataggtaatcaaaccttgaacaccagaaccgatattaattccttcatagagctgttgggcaaccatcatggtttttcgagtacggaaattgattttattggcagcatccatctgcatagatgaagtggtatagggtaaaggagcattgcgcttgcgctctttcttatccacctgatctactgaaaagtctttactcgtcagacgagacaagacttccttgacttcgttattgctggtcagtttcatctttttaccatctactccatagaaggaagcatgaaattgtttggttccctttttaaagacagcatcaactgtccagtattcttctggctggaaggcattgatttcattttcacggtcaatgatgagtttaagggcaatggactgaacgcgacctgctgacaagcccttcttgaccttcttccacaaaataggcgaaatcgaataccctaccaagcgatccaagatccgacgagcttgttgggcatcgaccaagtccatatcgatcttacgaggttctttaaaagcatttttgactgcatccttggtgatttcattgaagaccacacggttggcatcattttcatccaagttgagaatatgggccaaatgccaagaaatcgcttctccttcacggtccgggtcactcgcgagaaaaactttattagcttttttagcttcttttttcaagtcattgataagagggccttttcctcggatattaatatattgcggttcataattattttcaatatcgacggacatactggatttcttcaaatcacggatatgcccgacactggctaaaaccttgtagtttctgcctagatatttttcaatcgtcttggccttagcaggcgactccacgatgactagattttttttaactgttgattttttcttttttgttgccgtagccacagtatcacaccttttcaaagtaataaactttataaagtgtaaaccattttttgaaccctgtcaagacttagctactataatagaagaaaagttttatacttaaaacctcagtcttcctttgatatacatagaagactcacgagagaaaccagctattctcaagaaattattgctcctcagactctgtatcaaatttattggctttctccttttcttttgcttccttatccttgatatactggaagaaatactccaccagctcttccttactaagttgttctgaatcagacaattgtgaaacttgaacagaaacatcacttaaaccatagtcacctctcttacttgaaatcatatcgagttcttcttctgtcaaataatttcctgaaatggttagctttagggtatgagtctttttagaataggtttttttcaaaatattatacccctgaaactgctctgatataaatttcttaagggactcttttttcaacgtttctctcactaaagtcgttgcagagatgaaactcggaatcatcagcaaaacagcaactagaagcaaaatcctacgcattttagagtcttcttcattatctttaaaataatgtttcttaaccatcatcaacctaacacctatataagtcgcaatgacaataaagctacaattgatgaggaataggtaagaggagcctatgataaattttagattagcagaagcaatagcataacctactgtacaaagaggaggcatcaaggcggttgcaatagcaacaccaggaacaatattattggtctcttttttcctagcaccaatgatacctgctatccctcctacaaaagcaatgagaacatcccaaatagtcggagaggttctagcaacaatctccgaactagcatacgaaatgggagaaagataaaaataaagtgttgaagctattagactggcaagaatttgaatagctaatattttaaaagattttcttaacaatttaaaatcaaatatagctagagagagccccactcccagaataggtgtcatcaaaggagagattaacatggctccaataatcacgggagtcgaatccatatttaatccgatagaggcgataagcatggcacatagtaaaatcgctaaatcacttctggaaagttctaattcttcatatattttatttctaaattctatcaacgaatacagtttattatttgtcacaaatatcttcctttcccagctaactagtcgctaaaatcctaacaaactcaatactttagtagtctgatatgccaatctcacgagctctttttatcattttccataatatcctgactcaaatgtctactgatatctctcatcagtttcatttctagtaaatgaaaatcaaactcggaagctaaccgtagcttgctcaaaacacagcaaggcaaagctgagctgacgtatttgaagagattttcgaaaagtatcatcatctatttcagaccattttttataataaccattttatttttatttgtcaaggtctttgaattctttcttaaacaagccttgtaatctctacttttgaagaatttatttttccttactgacaagatttgagacggtaggaatcattgaacataacctagccaacatcaatcacaatcatttctcctttctcaattacactaaattatagtgtaattgaatctataacagtacaccttggctgctaaaatatttctataaattaatttgactttcctgatagagttgttcacatcttatttcaattcactatactttcccttatactcaatgaaaatcaaagcgcaaactaggaagctagccacaggttgctcaaagcactgctttgaggttgtagataagactgacgaagtcgctcaaaatactgttttgaggttgcagatggaagctgacgtagtttgaagagattttcgaagagtattatatgagaaaaatcctctactctactaatccacttagaaaaaacgcatattatcaagtgttaaaaacttgctaatatgcgttttattatggaaatgttgggttcattttctcttaaaattgattttttcttagaattctagcttaggtcatttttaaaattcaaattccgcaagaacatcttgcccactggtgaccaattttgctccttcttgaatcaaatgatggcaaccgtctgatagtccatctaaaatgctaccaggaatagcaaagacatcgcgtccttcttccattgctcgctcacacgtaatgagactacctgaacgcatcttagcctctgctacaatcacaccacgacaaagtccagcaatgatgcgattacgggcaggaaaatgaaatttcagaggttgttcaccaggtccatattcacttagaaccagatggtcattgccgatgtagtcttgcaagcgtttattggctttaggataaaacacatccagtcctgttccaatcactgcaatggtttttccgccattctgaagagctgccatatgagctgctgtgtcaatgcccttggccagaccactgacaataaccagttcattttccaagccttgaatgactttttcaactgacttagctccctgtttgctacaagcacgactgcccacgaccgctaccttcgggaatttcaggaggtcaagatttcccttgtaaaataaaagtacaggcgcatcatatatttcactcaaatcccaaggataacagtcatctaaaatagagaaagatggaaatttttgaaactctttcgacaaatgcgcatcgtctatctgaaaataacgttccataaaaacggctggattacggcaacctgagatatctgcaatatcacccaacaaaagctcctgatcaacattttcaccgtattctagcactttcaaaatctgttgattggtcaaacctgatttttttaacttatagatttcatagtttgtgattttcataaataactccatttctttttctactcatctatctattcgtaaaagttcgtaaaaaatcaaaaaacatccgactattttgtcagatgttggaatctttaattttcgtttttaagaatttcttctaatttacgatagtcttggacactatcgatctcataaatgctattgccttctaattcttcaacatagacatctagctctttgatattatccttaaccatattgtcccaatagagatcaacaaattcaccacttacataagccttgtcgataaagctgacaatcttttctgcagttggagcatcccagaaggatacaccactaaggatgcgacctgccttgctatcaacaataatgtcttgaaccttgtagtcatctccataaaccaagaaccattcgttggtacaatcttcacgataaacactaaaataagtcgaacgtgtcaaatcattgcggaacatatttttaaagagataattgtcagcatcaataacatagctgttggccaattcttcttttacaagatagagagagtaaaagttattgtagtcagcgtatttatcattgaaaacgagacgaacaccgtatttctctttcaagtaatcgaattgttctttaagataaccaacaatgatgatgatgtcattgattcctttttctttgagaaactcaatttggtactcaatcaaaggtttttgattaacctgaaccaaggctttaggggtattttcagtcataggacgcaagcgagttcccaatcccgctgctaagataatggctttcacacgaatctcctttattctttaataataatataaactccagcaatgacgacaagtgacgtcataatggtcagcatatctagcggtgcacccaagaaaacaactgcaaacaagaccgtccatactacatagctcacgttcaagcctgtagccttggctggttgcaagcgattgatagcgatataataagccaagtaggaaatcatatcaaaggctgcaaaaacaatcatgagacctagcaattgtccattggctactgcagtaaatgactgatgagagaagagcacaatcacaagataggacaagaacgaagttacttgacggattaagagggcttcgatttcactcaattcactttccatggcaaaagagctaagaacactctcacttccccatgcaatagcacaaaccaaagcacaaagaatcccaatgtagaaagaattaacctgttcaaccttataggtctgagcaataatccctccaataatcaagacaatcccaaatacagtatttttcgaaatcttgtgcttcaaaaagaagaaagccaatagaactgaaatcgcagggtaaatagccgatacagatgaagctaaagaacttccgatatacttaactgcataaagattggcctgcataccgatagggcctgctagcaaggctccgatgataacactgacattgcgaatatttaagaaaattgagaggcgaactttcccttcttttaccaagagaaaagctagtaagataaagatgctcaaaaaatcatgagttgcagccaccacaaagggtgacaaatctgtaaaaatcgaaaagatataagcactaaccgttagacccaagccccagaaaatacctgagagaaggccaaaaggaactccgtttttacttttcatctgaacctccataagaagccaaacctttaatagctctttggtaacgattcacaccatagtcaccaaaatcttcaccttgctcttccttatagacagtccatagactccaaatagtatcttgtaaaattttataaatagcaatcttttcatgagaaaccggtgtttggtcactctcatagtgagataagaaagtttcttcctcttgggaagtgaattcagactctaaaaagagggcagccaaatcccacattggatcattcattgatgaatattcccagtcaatcaaataaagtcgtccttgaggtgattcgataaagttttcaggcaccaaatcgatatgacaagattttctgtcaacacctaagtcagccagtcttttctctaaggagaagactgcatttctaacagattcatagttggcataaggaatttgttcttcaatcaaggattcgtattttttgatttcttcaaaaggagcaaattctcctcttaattccttagcagacgtatgaatagtttgtaatattggagtaattttgtcgaacttggtcttgattgacgttgaatcaagcgtaatcgcagattcgatatactcatttactttgataccagcttcaatatcaaaaagataattttttacatctaagcctaaatcctttagtagttcaagattgtacttttcatcttgtcgattgataagcttttctgtccctttaccaaagaatttaacaatgtattgcttatttgttgttttggccaaatagttttgattggtcattccacccagttgttcaacactgaggacttcctcttcttgactaagtaaggaagaaattttttctttaatgattttctccacaattaacctccagtacttatacttcccacttaaacactgttttaaaggctgtgtttaaatcggttgcaaagacacgatgaatatctttaatttctcttacaggttcttctagataaaggatatttttaagacgattggcaaatttcttgacttccatcatttggatagcattttcaaaatcaatgcgaccagaacgagatgacccaaccaaaatcaagcccttttctaaggcatcgcgagtattgagattgactttatattcgctaactcccatcatgagaatcgttccctgaggacgaatgtagcgaatcaagtcattaatagctggtccagtaccatcaccaccacaacattcaaaagcatggtcaaaggccaaatcttcaggaatattatccgtaatatagcattctttggcaaatgagaagagttccaacttttcccaatgacgaccaataaccacaatctctgcttctggcaaagtatagttgataatattggcaaccacaaaagctaaacttccatctccaataacggcgatccgctcccgcttgctatgagcaagagtcaatagacgattcatagcgtgcatgcccacactgacaaactctgtaatggctgcaaccgtatcttcaatagcatcataagccaccacacgatctttagggagagaaacaaactctctcataaagccatcaaatccactagacaagaaatgggtccctgtcatgtagttttcatagaattcttcatcactctgcataggagactgattgggaatcatgacaactttttgaccaacctcgtaggttccggtcgggtcagaaatgacggttccacatgactcgtgaatcattgccattggaagctttttattcaaaatcttgggatcacgttttccctgatagtaacgctgatccgcatgacagacagccatgtagttgggacggataaggatatgattctcttggtcaatagcctcttcctgatatttgacattgataaacttaggcttagttagttgataaatttgattaatcattttactagtctttctcaatcatactttttgcaatcttcaaatctgttacggttgtaatcttcagatttgagtattcacctttggccaaagccacatcttttcctttgatcacaaagattttacatgcatctgtcaagatttccttctcttcatcagaaagagatccataaaggtccatgaagtccttgcaacggaatgtttgaggtgtttgtccttgataaaggtgagcacgatttggaatatctgtaataaattgaccattggtactttcaacgatagtatcaaccgcttctaccactgtgtccactgcgtcatgattttgggcaagttggatattgtcctgaatcatgcgaagtgtaataaatggacgaacagaatcgtgggtaacaacgatatcctctggagtaagcggacgataagcatcaatggcttcaatgatgttcttaatacttgtattgcggtcagcaccaccctttgtaatgatgatacgttccttataaagaggaagatatttatctacaagatcttctgcatgagaaacccagtctccatgaacaccaactacaattttttcaatacttggctccaagacaaatttttcaattgtatgaatcaaaataggtcgatcacctagctctaaaaattgttttggcaagttactgatccccatgcgtgtgccagttccaccggcaagaattcctgcataaatcatctattttctcctttgtcttactaaaaaaacttattctctctattataccacaatctagtcctatcataaaagaaatactggtcctccccttctagaataggagaattatgcagttctattattcaaagaaactagtccatttctagtaatgactaggaattctgtagcaattactaataaatggctgcgaaattttagagtccttcagaataatatactttccttaaagaaaacttaaaacttaagatttgaaacttcaaagtgattacttgacttactgcccttcatttcttattagctaactttatgatataatgaaaaacgaggtaaattgaatgaaaagtataaaattaaatgctctatcttacatgggaattcgtgtcttgaatattatttttcccatcctaactggaacctatgtcgcgcgtgtcttggaccgaactgactatggttacttcaactcagtcgacactattttgtcatttttcttgccctttgcaacttatggtgtctataactacggtttaagggctatcagtaatgtcaaggataacaaaaaagatcttaacagaaccttttctagtcttttttatttgtgcatcgcttgtacgattttgaccactgctgtctatatcctagcctatcctctcttctttactgataatccaatcgtcaaaaaggtctaccttgttatggggattcaactcattgcccagattttttcaatcgaatgggtcaatgaagctctggaaaattacagttttctcttttacaaaactgccttcatccgtatcctgatgctggtctctattttcttatttgttaaaaatgaacacgatattgttgtctatacacttgtgatgagtttatcgacgctgattaactacctgattagttatttttggattaaaagagacatcaaacttgttaaaattcacctaagtgattttaaaccactctttctccctctgacagccatgttagtctttgccaatgccaatatgctcttcacttttttagatcgcctcttcctcgttaaaacagggattgatgtcaacgttagttactataccatagctcagcgaattgtgaccgttatagctggggttgtaacaggtgcaattggagtgagtgtgcctcgtctcagttactatctggggaaaggagacaaagaagcctatgtttctctggttaatagaggtagtcgaatctttaacttctttatcattccactgagttttggactcatggttttaggaccaaatgccatcctactttacggtagtgaaaaatatatcggaggcggcatcttgacctctctcttcgcttttcgtacgattatcctggccttagataccattcttggttcccaaattctctttaccaatggctatgaaaaacgtatcacagtctatacagtctttgctgggctactcaatttgggcttgaatagtctcctttttttcaaccatatcgtggctcctgaatactacttactgacaactatgctatcagagacttctctacttgttttctatatcattttcatccatagaaaacaactcatccacttgggacatatctttagctatactgttcgatactctctcttttcactttcctttgtagcaatttatttcctgattaatttcgtgtatcctgtagatatggtcattaatttgccatttttgattaatactggtttgattgtcttgctatcagctatctcttatattagtctacttgtcttcacaaaagatagcattttctatgaatttttaaaccatgtcctagccttaaaaaataaatttaaaaaatcataggagtttaaaatgaaacaactaaccgttgaagatgccaaacaaattgaattagaaattttggattatattgatactctctgtaaaaagcacaatatcaactatattattaactacggtactctgattggggcggttcgacatgagggctttatcccttgggacgacgatattgatctgtccatgcctagagaagactaccaacgatttattaacatttttcaaaaggaaaaaagcaagtataagctcctatccttagaaactgataagaactactttaacaactttatcaagataaccgacagtacgactaaaattattgatactcgaaatacaaaaacctatgagtctggtatctttatcgatattttccctatagatcgctttgatgatcctaaggtcattgatacttgttataaactggaaagcttcaaactgctgtctttcagtaaacataaaaatattgtctataaggatagccttttaaaagattggatacgaacagccttctggttactccttcgaccggtttctcctcgttattttgcaaataaaatcgagaaagaaattcaaaaatatagtcgtgaaaatgggcaatatatggcttttatcccttcaaaatttaaggaaaaggaagtcttcccaagtggtacctttgataaaacaatcgatttaccctttgagaatttaagccttcctgcacctgaaaaatttgatactattttgacacaattttatggagattatatgaccctaccaccagaagaaaaacgcttctacagtcatgaatttcacgcttataaattggaggattaggatgcaatatttagaaaaaaaagaaattaaagaaattcaactagccctgctggactatattgatgagacttgtaagaaacatgatattccttattttctcagttatggaaccatgcttggagccatccgccacaaaggtatgattccttgggatgatgatattgatatttccctttatcgtgaggattatgagcgtttactgaagattattgaagaagaaaatcaccctcgctacaaggttctttcctacgatacatcttcttggtacttccataatttcgcatcgattttggacacttctactgttatagaagaccatgttaagtacaagcgtcatgataccagccttttcatcgatgtcttcccaattgatcgatttacagacttgagcattgtcgacaagagctataagtatgtggctcttcgtcaactagcttatatcaaaaaatcacgagcagttcacggtgatagcaaactaaaagattttcttagattatgtagctggtacgctctccgatttgtcaatcctcgctacttttacaagaaaattgatcaactagtcaaaaatgctgtaaccaacactcctcaatatgaaggaggagttgggatcggtaaggaagggatgaaagaaatcttcccagttgatacctttaaagaactgattttaactgagtttgagggccgtatgttgcctgttcccaaaaaatatgaccaatttttaacccagatgtatggcgattatatgacaccaccatcaaaagaaatgcaagagtggtatagtcatagcattaaagcttatcgcaaaaactgattgagggggattatacaaactactaagatagaggttattcaaaaacataattttagtagaaaatgaaatacatattcccacaataaaacgcatcatatcaaggtttttgaaaaaccttgatatgatgcgttttataattttaaagacttttttctatagtagattgaaataagatgcgaacaaatcaattagaaaattcaaattaatttatagaaatattttagtattcctgtgtactgttctaaattcagtctgctatatcttatttttctatttaaatcgcttctgtaacaaagctacgactttcaagtaccttaagcatggcattagctgtatctagcgctgtgaagaggggcaccccgtgttcaatggctgaacgacgaatttgctcaccatcttcgtcagcagttcgttttgttcctactgtgttaatgatagcttgaattcttcctttgcgtacaaaacttgggatatccttatcgtcatcaccaatcttaccaacaggttgggcttgcaagccatgactagcaaagaaggctgctgtcccttctgtcgcaaggattccataaccaatgttttggaaacgacgagccaagttcaaggcttcttctttggcatcatcagcgatggtaaagacgacattaccaaaagttggcaagtgtagataagaagcttcaaaggctttatagagagctttttccaaagtagcatcagaacccataacttcacctgttgacttcatttcaggaccgagcaagctgtctaccttagctagtttggtaaaggagaagacaggtgccttgatatgaacacgggtgctttcagggtaaagtccattttggtagccaagttctgataaactttgaccaagaatgagtttggtcgctacttgagccataggaatattggttaccttagataggaatggaacagtacggctggcacgtggattgacctcaataacgtagactttttcatccttgataacaaactggatgttcatcattccaaggcagtgaagaccgattgctaagcgtttggtgtagtctgcgatggtctcctgaaccttttgcgacaaggtttgtggtgggtaaacagccattgagtcacctgagtggacaccagcacgttcgatatgctccatgataccaggaatgagtacatttttaccatctgaaatggcatcaacttcgcactcttgcccaacgatataagagtcgacaagaactgggtggtctggactagccttaacagcagttcgcatgtaagaacgaaggtcttcttcgttttcaacgatttccatggcacgtccaccaagtacataagatgggcggacaagaactgggaagccaatcttgcgagctgcaagagctgcttcttcttcattggtagccgtttgtcctggtggctgtggaatatccaattctttgagagcttgctcgaagaggtcacggtcttcggcacgatctaggtcagcaacctgtgtaccaaggatggtcacacctgcttttgccaatggctccgcaaggttgatggctgtttgaccaccgaactgaacgataactccctttggttgttccaagtcaatgacgttcataacatcttcgaatgtcaatggctcaaagtaaagcttatctgatacagagaagtctgttgaaacggtctctgggtttgagttcatgatgatagcttcataaccagctgcctggatagccttaacagagtgaacggttgcgtagtcaaactcaaccccttgaccgatacggattggacctgaacctaggacaagtacagattctttatcagatctgatagattcattttcccaaccataggttgaatagaaatatggcgtttcggagtcgaactctgccgcacaagtgtctaccatcttataaactggaacaatcttgttttccaagcgaagttggcgaactttatcatcagtcgttccccagagttcagcaatcttacggtctgaaaaaccattaagtttggctgttttcaaaacttctaaatcttgtggatgagcacccaattcttgctcaatttcaaagatatgcaagagtttatcaagatagaagatatcaatttttgtaagctctgcaatttcttcaggtgtgtagccacgacgaatggcttctgatacgtagaagagacggtcatcttgggctttgacaaccttttcaatcaaggcatcatcagaaactgctgcaagttcaggtatttcattgtggtgcaccccaatttcaagggagcggcaggccttgagaagagattcctcgatgttacgaccgattgccatgacttctccagtcgccttcatttgtgtaccgagacggcgttcacccttttcaaacttgtcaaatgggaaacgtggaatcttagcaactacgtagtcaagggctggttcaaacatggcataggttgaacctgtaactgggtttataacctcatccaaggtcaaacctactgcaatcttggcagccaacttagcaatcggatatcctgtcgctttagaagcaagggctgacgaacgtgatacacgagggtttacttcgataacataatacttgaagctgttaggatcaagagctagctgaacattacatccaccttcaatcttgagggcacgaataatgctcaagctcgcatcacgaagcatttggttttcatagtctgacatggtttgcgcaggggcaaatacaatggaatcccctgtgtgaatcccaactgggtcaaagttttccatgttacaaacaaccaaggcattgtcagctgagtcacgcatcacttcgtattcaatttccttgaaaccggcaatcgaacgctcaatcaaacattgggtaacaggtgacaatttcaaaccattttcagtgatttcacgcaattctttctcgttggcacacataccaccaccagtaccaccaagggtaaaggctggacgaacgatgactgggtagccaattgtcgctgcaaaggcaactgcttcttctactgtgttaacaatttcagattctggaatgggttgttcaagctcttccatcaattgtttaaagaggtcacggtcctccgcttggtcaatggcagataatttggtacccagaagttcaacgccaagctcgtctaggataccatttttagataattccatggccatgttgagacctgtctgaccaccgagtgttggtagcaaggcatctggaccttccttacgaagaatacgtgtcacaaactcaagtgtaatcggttcaatgtaaaccttgtcagcaatttccttgtccgtcatgatggttgcaggatttgagttaaccaaaacaacctcataaccttcctctttcaacgacaagcaagcctgagtcccagcgtagtcaaactcagcagcctgaccaataataatcggaccagaaccaatcaccataattttttgaatatcagtacgtttaggcatatataagatattaagggtgtcaagcggacaaagctaaaataggagttatgacgaagaactgtcagttctaggaataactatctttttagcaccgtccgtagcccgtattcagttcagcaaatacggagcacccttctcctttctattcgtcgcctctcagggcgacattaaataagatacaaaggacgaatagaaagcgattgaattttaggaaatcaaggaaggattgacaatccaagttggtttctctacattctgagctttccgtccgtgttcagttacataaattctccgacgagcttttactcgttcttagtttgattgtttaaaaacttccatcatctcgataaactcgtcaaataggtagctagcgtcgtgtggcccaggagctgcatctgggtggtattgaacagagaaagcaggttggtatctgtggcgcacaccttccactgacttgtcattgatttcttcgtgggtaataatcaagtgctctggcaaatcctcgcggctgactgcataaccatggttctggctggtgaagtctactcgtcctgttgcgatttcacgtaccgcatggttgaatccacggtggccaaacttcatcttataggtcttagccccgtttgccattgcaaagagttggtgtcccatacaaataccaaagattggaatttttccttgtacaccgcgaatcatgtcgagtgcttgtggaacgtcttctgggttacctggaccatttgacaacataactccgtcaggattgagatggagaatttcttcagccgttgtcgaataaggaacaactgtcacgttacagttgcgtttagaaagttcacgtaggattgagtgcttgagaccaaagtccactagcaccacgctcaaaccaactcctggagctggataagacgttttagtagaaacctgtttgatattgtctgtcggtaaaactgttgcttggagctggtccgtcacatggtccatactgtccccaacatgggtcaaggttgcacgcatagtaccatgcttacggataatcttggtaagagcacgcgtatcaattcctgaaatccctggaattttcttggctttcaaaaattcatccaaggtcatttggttgcgccagttgctagctctacgcgcttcttcaaaaacaacgactcccttacaagttggaataatggattcataatcatcacgattaataccataatttcctaccaaaggataagtaaaggtcaagatttgtccattataagactggtctgtaatggattcttggtagccggtcatccctgtattaaagacgatttcgcctgttacatcaatatctgctccgaaggccttgccttcaaaaactgtgccatcttctaatactagaattctttttgtcatattttcacctctcgtggacgctcactggcgtcttttaacgtcttgtgttttagttggcgtttctactcgctagtacggattctaagattgccattcgaacaaagacaccattggtcatttgttggacaatccgtgattttggtgcttcaaccaagtggtctgctatttctacatcacgattgattggagctgggtgcatgaggattgctgtttctttcaaacgatcgtaacgttcttgagtcaagccatgttgggcatggtagtcttcttttgaaaatacagctccactatcatggcgttcgtgttgcacacggagaaacatcatgacatcaacctgatcaatgatttcatcaatggttacaaactgtccatagtctgcaaactcttgacttctccattcctcaggtccagcgaaaaagagttcagctcccaagcgtttcaaaatctgcatattggatttggcaacgcgtgagtggtccaagtcacctgcaatagcaactttaagaccctcaaagtggccaaattcctcataaatggtcatcaaatcaagcaagctctggctagggtgttggcccgaaccatctccaccattgatgatggaagtcgtaatcgttggactagcaatcaattctctatagtagtcgacctctggatggcgaatcacacagacatccactcctaaagcagacagagtcaaaatggtgtcataaagtgtctcacccttattaaccgagctagtcttcacatcaaagtcaagtcgttccaatccaagtttaatctctgcgacttcaaaggacttatgtgtccgtgtagaatcctcaaagaagagattggaaacaatcggatggtcttcatagggaagctgggctccatttttaaactcaattcctcgcttgatcaatttcattacttgatcgacagtgaggtcttccatggacaccacatggttcaatgcttgttgattttctgacatggctactcctttaactttctaagcttcttcagtaatcagaactctgtcttggtcatcaagttctgtcatctctacgatgatttcttcagaacgactggttgggatattttttccaacgtaatctggacggattggcaattctctatgtccacgatcgactagaactgctaaactcacacgcgcaggacgaccatgaccgacaatattatcaatagcagcacggatggtacgacctgtatagagcacatcatccaccaagataacttcgcggtctgtcacatcgacagaaaccaaagaagtatcttctccacttttaacatcatcacggaaaggtttagtatccaattccacaacaggaactgaaagattttctaactgcttcaaacgttcttggattcggtgggcaataaagacaccacgagttttaataccagccaagacgatcttattcaaatctttgttgcgttcgataatctcataagtaatacgcgtaatcgctcgtttgacggtcaattcgtctacaacttcttttgttttcatgacaaacctccaaaaagaaaagtctccttaaacaaggagacttgaaatttatagccaagcgagccctactgcacacagtatagacttcacccttctactttatcgcgctccttgcctgcctcacgggacaggtttaaaggaatatttagttatcatttactatagcacaaagcatgcttaaaatcaagcaaaaagtttcaatgtagcatcttacaaattgctaaaatcatataattgtgggtactggtcacactctggattttttggatggcaaatggctcttccaaaataaatcatggcctgatgggcagctaaccactgctcaggcggcaagatatccatgacccgcttttccacctcaagtggcgtcgctgattttttgacaatatcgtggtgtttgcaaatacgctccacatgagtatccactgcaaaggctggaattccaaatcctacactcatgacaacattggctgtcttgcgaccaacacctgccaaactctccaattcttcacgtgtctgagggacttgaccatcaaaatcgtctagtaactgttgggcacattttttaaggaatttagctttattccgatacaatcccaagcgagaaatatgtgaagcaatctcactctctgtcgctacagacatagcttggggtgttggaaaggcaacaaagagacctggtgtggccttatttaccgctgcatctgtcgtctgggctgataacatgaccgcaaccaggagttcaaaatgattggtaaaatcaagactaggcttggcatctgggaagagggcaatgatttcttctagcacctttcgtgctcgtttttttgacaagaccattattcatctccgtcaaatagtccttgtaagccagcaaaaggactgttttcttctttctttactgctttttgagcttggtattcttcctctgtcatgatttgccagtcatttcctgagataaatccttgaccagcttcttcttcagccgtcaagaccttgataggaatgtttagcaggatattgtctgatacactctcagcaaggtcaagctccccattttcgatgggcaagaccaagtcatcatctaaaacttcttgatctagctggttagttgcgccttccatgaaaacttccgtgactggataagattcaactaactcaactggctccatactgcgactcgaagcaagaacaatggtataagatagttgataatctaagaaatacatacggtcttcatattgtactttcccaactgcaaggatatcttttacatctaaaatttcttgattacgtgcacgcaggtcatcaactaaatctaacgtttgttcaaagttcaaaccttcagactgcttacgaatttcttgaatatttaatttcatacttcctccataaagatttactctcttgattataccatgaaaaggctacaaatcagcacaccaaactttgtaattaaaattcaaaattttaacatatttactatgatagttttattttttagtgctatactatagggaaagagtacatcagatcaaggaggatgctcacatggaagacaagaaactcattcaactcctatccaagttaaataaaagctaccaaaactgtaaacagggtacggcagatgatattcgactacaagagctgctaaacactactatgcaagagctcaaaaaaacggaacagttgaacaacagtatcttaattgatcttgagaaattttaccaacctaccagtcttctgattggactgggtagcctaaaactaaacgatcaagcacgcactgcttggcgaaactatgataaattccattacgatcatgtcaaacacgtactaagtctctatggacctgtttttgaattttagagcatagaatttccagttttctgttgacaaaatttccttaaaggtataatataaagatactaatactcggaggtaagggagacatgaacaactaagtctatcaaataaagaacctttatttagtagatcttgtttttgtctctttttgtgtgctcttttatgctctttttctggcatgttaatagagtttttttgacatagactttgggctctactaggtaaagtagagctttttgttatgcactatgaacattctagaaagggaaatcatatgataaaaatcaatcatctaaccatcacacaaaacaaagatttacgagatcttgtatctgacctaaccatgaccatccaagacggggaaaaggttgctattattggtgaagaaggaaatggcaaatcaaccttacttaaaattttaatgggggaagctttgtctgatttcactatcaagggaaacatccaatctgactatcagtcactggcctacattcctcaaaaagtccctgaggacctaaaaaagaaaactttacacgactacttctttttagattctattgatttagactacagtatcctctatcgtttggcggaggaattgcattttgatagcaatcgtttcgcaagtgaccaagagattggcaatctatcagggggcgaagctttgaaaattcagcttatccatgagttagccaaaccctttgagattctatttttagatgaaccttcaaatgacctagaccttgagacagttgattggctaaaaggccagattcaaaagaccaggcaaaccgttattttcatttcccatgatgaagactttctttctgaaacggcagacactattgttcacttgcgactggtcaaacaccgtaaagaagcggaaacgctagtagagcatttagactatgatagctatagtgagcagagaaaggctaattttgccaaacaaagtcagcaagctgctaacaaccaaagagcctacgataaaaccatggaaaaacatcggagagttaagcaaaatgtagaaactgcgcttcgagctaccaaagatagtactgccggtcgcctattggctaaaaagatgaaaactgtcctctcacaagaaaaacgctacgaaaaggcagctcagtccatgactcaaaagccacttgaagaggaacaaatccaacttttcttttcagacatccaaccattaccagcttctaaagtcttagtccaactggaaaaagaaaatttgtccattgacgaccgagttttggttcaaaaactacaactaactgtccgtggccaagaaaaaatcggtattatcgggccaaatggtgttgggaaatcaactctgttagccaagttacagagacttctgaatgataaaagagagatttcacttggttttatgccacaagattaccacaaaaaactgcaattggatttatccccaatagcctatctcagtaaaactggggaaaaagaggaactacagaaaatccaatctcacctagctagtctcaatttcagttatccagaaatgcagcatcaaattcgctccttatctggcggacaacagggaaaactcctgcttttggatttagtcctgcgcaaaccaaactttctcctgctggatgaacccacacgaaacttttctcccacttctcaaccccaaatcagaaaactctttgctacctatccaggcggtctcatcactgtttcgcatgaccgtcgtttcttaaaagaagtctgctcgatcatctatcgcatgacagaacacggtttgaagctagttaatttagaagatttataaatttgcaacatagcaaaaatccagagacgacctctggattcttttacatctgttttaaacgttcaatccgttctgagataggtgggtgggtataaaagagtttttggaaccccccacctttcttaggatcattgatataaagggcactgctagcatcatcgacgtggcgactcataggtttgctattgtccaacttatctagggcattaatcattccctggggattgcgagtcagctcgacactagatgcatctgccagaaattccctctgacgagaaatagcgagctgaaccaaggttgcagcgagaggtgccagtacaatagctagtagggaaaccactagcataatgatttcaagaccatttccatctcggtcatcatcacttcgtctgcgacctgctccaccccaccacatcatacgacctgccatactagaaagcatggtgatagcactagcaagggcaactgcaatagtcgaaatacggatatcataattacgaatatgactgacttcatgtcccataacagcttctagttcttcacgattcatgatagctagtagacctgaagtcgcagcaacagccgcattttgaggattagaacctgtcgcaaaggcatttaaggctggatcatcaatgatgaaaacacggggcataggaatctgagcgaccagagccatatcttccactacatggtagaggtctggtgccgtttgctcatccacctcacgcgctccattcatggacatgacaatctctgtcgattgaaaaatcatagacaaagcgtagataaagccgataatcagtgcaataaccaaaccaccaagtccagatcttataaagagataaccaaccgcataaccaacaagagctaagagtaggaaaaataccagcaacaaaatccaggtttttcgtttattgcttgcaatttgatcaaacaacatcttagtcacctaaaccgctaaaatcaactttaggaaccgacttttcctcttcaggtgtttgaaggaaatctgccgctttaaatccaaacattccagcgataatattgctcgggaaagtttctaattttacattgtagttgctgacaacactgttatagagttgacgagagtaagaaattttattttctgtgtttgtcaactcctcttgcaatttaacaaagttagcactagctttcaaatctggatagctttctgcaactgcaaaaatacctgaaacctgacgagtgagggcatcactggctttcatagcttctgctggtgaagtcgctgccgccacttggttacgtagttctgccaccttttcaagggtagaaccttcatatttggcataaccttttacagtctcaatcaagtttggcaagaggtcattgcgacgtttcaactgaacatcaatctgactccaagcctccttggtttgcatacgatttttaaccaaaccgttatagctaacaatcacaaaaataacaataagagcgataactccaagaataatccaagtcataatataagtcctttctgcttttagattagtaccagtatatcaaattttctatgattgtggtaaaataagatgatactaaagaaggaaataactatgaaaccaaaaacattttacaacttgcttgccgagcagaatcttccactttcggaccagcaaaaagaacaatttgaacgttattttgagctcttggtcgagtggaatgagaagattaatttgacggcgattacggacaaggaagaagtttatctcaaacatttttacgattcgattgcacccattcttcaaggtttgattcccaatgaaactatcaaacttcttgatatcggggctggggcaggatttcctagtctaccaatgaaaattctctatccggagttagatgtgaccattattgattcactcaataagcgcatcaacttcctacaactcttggctcaagaactggatttgaacggagttcatttctaccacggacgtgccgaagattttgcccaagacaagaacttccgtgctcaatatgattttgtaacagctcgtgcggttgcccgtatgcaggtcctatctgaattgactattccctaccttaaggttggtggcaaactattagcactcaaggctagcaatgcgcctgaggaattattagaagctaagaatgccctcaatctcctttttagtaaggtcgaagacaatctcagctacgccctaccgaatagagatccgcgctatatcacagtggtagaaaagaaaaaagaaacaccaaataaatatccacgtaaggctggtatgccaaataaacgcccactttaaattttttagtaaacaaatgtttacaaaatcagcctcgctcttttatttctaggctcgggaaaaaatgatttacaaaatcagcctcgctcttttatttctaggctcgggaaaaaatgatttacaaaatcatttttttctgctatactatcctaagcaaaggtttttaatgtcatcccgtgaggtgacgaagacgcagaaatatttaaaactctttaaaatctaaattttaaagaagtcttactctgagggcctattgctgtaaaataatgggctcttttttgatgcccaaaagtgaggtttatatgaaacaagaatcaactgttgatttgttactagacgttgaccaacgtccttcggctggaaaaggaattctccttagtttccaacacgttttcgccatgtttggtgcgaccatcttggtaccattgattttgggaatgcctgtatctgttgccctttttgcttcaggtgttggaacactcatctacatgattgctactggttttaaagttccagtttatctaggttcttcatttgcctttatcacagctatgtcactggctatgaaagaaatggggggggatgtatctgctgcccaaacaggggttatcttgactggtttggtctatgtccttgttgctaccagcatccgatttgtaggaacaaaatggattgataaactcttgccaccaatcattatcggtcctatgatcatcgttatcggtcttggacttgcaggttcagctgttaccaatgcaggtcttgtagcagacggaaattggaaaaatgctctggtagccgttgttactttcctaattgctgcctttatcaatacaaaaggaaaaggcttcctacgaatcattccattcctctttgccattatcggtggttaccttttcgcactaactcttggcttggttgactttacaccagttcttaaagccaactggttcgaaattcctggtttctacttgccatttagcacaggtggtgcctttaaagagtacaatctttactttggtccagaagccatcgctatcttgccaatcgctatcgtaacaatttctgaacatatcggagaccatactgttttgggtcaaatctgtggtcgtcaattcttaaaagaaccaggtcttcaccgtactcttcttggtgacggtatcgcaacttctgtttctgccttccttggtggaccagccaatacaacttacggagaaaatacaggggttatcggtatgactcgtatcgcttctgtctcagttatccgtaacgctgccttcatcgcgattgccctcagcttccttggtaaattcactgccttgatttcaactattccaaacgctgtacttggtggtatgtcaatccttctctatggggttatcgccagcaatggtttgaaagtcttgattaaagaacgtgttgatttcgctcaaatgcgaaacctcatcatcgcaagtgctatgttggttcttggacttggaggagctatccttaaacttggtccagttacactttcaggtactgccctttcagccatgacaggaatcatcttgaacttgatcttgccatacgaaaataaagactaagagtctaaatacacctaatccactcagacagctgagtggatttttcgtataccataataaaagtgtcttaacaaaattattaaaatcaaaaaacgtataatatcagatattctaaaaccttgatactgtacgttttatcatagaaatttttactttattttctcatcaaatgagatttgcatcaatctcttgtcttacttgcgtttcttcttcgctttcttcattttgttagccatacgtttcatggactgtttcatggcaaattcaccaattttacctttcaaaccgccaccaaacatctggctcatatctggcattcctgctcctccgagagctgataagtcaggcataccgccttgtcccatcattccttcaagggcagacatatccattcctcccatatttggcatatttttaggaaggttatttggattaatccccatttgcttcatcattttattcatatccccagacataacaccctgcatgagctgtttagcctggttaaagtccttgatgaatttattgacttcgacgaatgtatttccagaaccagcagcaatacgacggcgacggcttggatttaacaaatctgggttttcacgctcttcaggtgtcatcgaagacacaatggcacgtttacgagcaatctggcgttcatccaccttcatgttttgaagggctggattgttggccatacctggaatcatcttgagcaagtcttccatcggccccatattttgcacctgatctaattgatcgatgaaatcattaaaatcaaaggtgttttcgcgcatcttctcagccatttcaagggctttttgttcatcgtattcctgagaagctttctcaatcaaagtgagcatatcccccataccaaggatacggctagacatgcggtctgggtggaaggtttcaatgtccgtaatcttttcacctgtaccagtgaacttgattggttttccagtaatgtgacgaacagacagagcagcaccaccacgagtatcgccatcaatcttggtaaggatgaccccagtcacttccaactgagcattaaactcacgcgcaacattggctgcttcctgaccaatcatagcatcaacgacaagcaagatttcatttggttgagccaatgctttcacatcacgaagctcattcatgaggagctcatcaatctgcaaacgacccgcagtatcaatcaagacatagtcgttatgattagtttgggcttgctccaaaccttgacgtacaatctcaacagctggtacttctgttccaagtgcaaagacaggcacatcaatctgttgtcccaaggtcttaagctggtcaatggcagctggacgataaatatccgccgcaatcatcaaaggacgagcattttcttctttcttgagtttgttggccaatttaccagcaaaggttgttttaccagccccttgtaaaccaaccatcatgatgatggttggaatcttaggtgacttgataatttctgccgtatcagaacctaaaacggctgtcaattcctcatcaacgattttaataatctgttgcgcaggattaagtgtatcaatgacctcatgcccgactgcacgctcacgaactttcttgataaagtcctttacaacaggcaaggcaacgtcggcctcgagcaaggccaagcgaatttctttggttgcctcttggacatcagattcagagatttttccttttttacgtagatttttaaagacgttctgcaaacgttctgttaaactttcaaatgccatttttcttcctcttattctctattatcaatgcttgttaaaatttctatctgctcctgcagaaagtcatccttgggatagcgctccaaaatctgatcaaaaatctgactgcggacaatatagtccgagtacatgtgcaatttcatctcataatcttccagaatcttttctgttcgcttgatattgtcatagacagcctgacgactgacaccgaactcctcggcaatttcagcaaggctgtaatcatcagcgtagtagagctcgatataattcatttgcttatctgtcaaaagcgccgcataaaattcaaagagcgcattcatacgattggttttttcgatttccataacttttattataccaaaaattagcctaatctaccacactaggaagccgatccaagaagatagatagctaaatttgaaaaagacatgagcctagccccaagtaatttccaattgatagctggcaaagggatgtccctcttgattttgtagttgataatctagttcaatcttttgcctatcaacttgataatggctcgtttggatgataaactcctgcatgcccataggtgtaggaatataggctaaactatcgctatcctttagaaagcgcataatggtcttgggattagaaaatcggctcatcacaagttcttgaccatgaaatttaatcactactttttccttttcctcattatagaaaagcaggtagctataatctcctttttcatgcacttccacatcataaagctggtcaatcacttccaactgctcatcaaactgaatcgtatttcgcatccgaatcttcacatcaggccctctttcttgtctcttgtcctactattttaccaaaaagagcaggattttgctataatggtcatatgaacgaaaaagtattccgtgaccctgttcacaactacatccatgtcaataatcaaatcatctatgacttgattaatacaaaagaatttcagcgtttgcgccggatcaaacaactgggaacttccagttataccttccacggtggagaacacagtcgcttctctcactgtctaggagtctatgaaattgcacgacgcatcacagagattttcgaagaaaaatatcctgaggaatggaatcctgccgagtctctcttgaccatgaccgctgctctcctacacgaccttgggcatggtgcctactcccatacttttgaacatctctttgatacagaccatgaagccattactcaggagattattcaaaatcctgagacagagattcaccaagtcctgctacaagtggcacctgatttcccagaaaaggtggccagtgtcattgaccatacctatcctaataagcaggtcgtgcagctcatttctagtcagattgacgcagatcgcatggactatctcttgcgcgactcctattttacaggagcatcctatggggaatttgacctgactcgaatcctccgagtcattcgtcctatcgaaaatggtatcgcctttcagcgcaatggcatgcacgccatcgaagactacgtcctcagtcgctaccagatgtacatgcaggtttatttccaccccgcaacacgcgccatggaagttctcctacagaatcttctcaaacgcgccaaggaactctatcctgaggacaaggatttctttgcccgaacttctccacacctcctgcctttcttcgaaaaaaatgtgaccttgactgactatctggctctggatgatggcgtgatgaatacctacttccagctttggatgaccagtcctgacaagattcttgcagatttatcgcatcgctttgtcaaccgcaaggtctttaaatccattaccttttcacaagaggaccaagatcaacttactagcatgagaaaattggttgaggatatcggctttgatcccgactactacactgccattcataagaactttgacctcccttatgatatctatcgtcccgaatctgaaaacccacggacacagattgagattttacaaaaaaatggagaactggccgaactctctagcctgtctcctatcgtccaatcccttgctggcagtcgccacggagataatcgcttttattttccaaaagaaatgttggaccaaaacagcatctttgcaagcattacccagcaatttttacacttgattgagaacgatcattttaccccaaataaaaactagaagaggaaatttatgagtattaaactaattgccgttgatatcgacggaacccttgtcaacagccaaaaggaaatcactcctgaagttttttctgccatccaagatgccaaagaagctggtgtcaaagtcgtgattgcaactggccgccctatcgcaggcgttgccaaacttctagacgacttgcagttgagagacgagggggactatgtggtaaccttcaacggtgcccttgtccaagaaactgctacaggacatgagattatcagcgaatccttgacttatgaggattatctagatatggaattcctcagtcgcaagctcggtgtccacatgcatgccattaccaaggacggtatctatactgcaaatcgcaatatcggaaaatacactgtacacgaatcaaccctcgtcagcatgcctatcttctaccgtacccctgaagaaatggctggcaaagaaattgttaaatgtatgtttatcgatgaaccagaaattctcgatgctgcgattgaaaaaattccagcagaattttacgagcgctactccatcaacaaatctgctcctttctacctcgaactccttaaaaagaatgtagacaagggttcagccattactcacttggctgaaaaactcggattgaccaaagatgaaaccatggcaatcggtgatgaagaaaatgaccgtgccatgctggaagtcgttggaaaccccgttgtcatggaaaatggaaatccagaaatcaaaaaaatcgccaaatacatcaccaaaacaaatgacgaatccggcgttgcccatgccatccgaacatgggtactgtaaaagtatcatttttcaataagaattgattagcaataaaatccaatgaatttttttagcaaactatttaatttaaaacaaaataatcataatagagacacaaattctgattgtaacaatttttacctaaacgaattagaatgtggccttactcctgggcaactcatactcatagattggactcaaaaaacagggagaaattataatttcccaagatattttaaatactctcttcaaattgaccctgaatctacacacaatcaattatacaaattaggatacttcactaaaaataagactttatcatatcttacagtagtagaattaaaaactatattatctaaacataatttagctacttctggaaaaaaagcagaattaattacaagaataattaataatgttaacattgacaatttagatattccgttcgaatttaaactaacaaaagaagcacaaaatcttattatcgaacatagtgactatatcaaagcatactatgataaagacataactatggaagattattgtaaagaaaaaaacaatatctcttttaaagcaacttttggtgatataaaatggagtctcttaaataaacaagctcataggaatactgtatcaggagattttggatgcttatctaacacacgaaaggctcagggaagacatttggaacaagaaggtaatattaaacatgctttaatatattacatagaatctttgataattactatttcaggattagaaaacaatttttcagccactgattatccagtatattatcccgattcgatacctgactactcactaaaacatattcaaacattaatggaatcattatctgatgacgattatgattttgcttttgatgaagcattatttcgcttctcaattttgaatgcaaatcattttttatctaaggaagatattgactatttaagagttaatttacctcgttccactgctgaagaaataaacaattacttaaagaaatatgaatgttatagtcctttaaataatttagaacttgacgattttgaataaattgactatacaaacatttatatactcgatatagtctcaattttatctgatgattgcccaaatttttcaataataaaacgcataatattatggagacaatcccctatattatgcgttcttttaatatcaaagactttttgacaaacttctttgatatctaattacatgccccctgcaggaatcgaacctgcaactactccttaggagggagttgttatatccattgaactaagggagctagataaaaactctgctaaatgagcagagttttttagtcgaattaacgacggatttctttgatacgagctgctttaccttgaagagcacgcaagtagtacaatttcgcacgacgtactttaccgtaacgaacaacttcgattttttcaacacgtggagtgtggattgggaagatacgctcaacacctacaccgttagagattttacgaactgtgtagttttctgagattccagcacctttacgtgcgataacaacaccttcaaaaatctggatacgttcacggttaccttcgacaactttcgcatgtacacgaacagtgtcaccaggacggaatgatgggatatctgtacgaagttgaccttcagtcaagctttggattaatggattcattttattctcctatctttgtcaatcttgaggaatcttcctcagcggataaactgtatttttgtgcgtccattacacacaagatatagtttaccaaatttctaaaaaaaagtaaagaaatttatagcaaaattcctaaaaaaatcgcaaccaaaccacctatgtaagtcaaagtcaggtaagaataaaagaccttcttatcacttagcagtctttgaagttcgtcattcaaggtcgaaaaagttgttaaaccgccacaaaatcctgttgctagaatagcatatacttccttagactctacatgattgtagaatactccaattaaaaaacaacctaaaagattagctatgagcgttccgagtggcaatttagaagcttgattatagcgagaaaagaaataccgtacgagtgctcccaagccacaggcgattgcaagatagacgattaccatttcttcctccccaaatagtaagctaaaagcaggcctccaccgatactcaaaagcaaatacagtatcaaactaagataacgccctgtatcaagcagcttcacagtatcaagcattaggctggaaaaagttgttaaacctccgcaaaaacccgtccccagtgctaaaatcaagcccttactagtccccttatagaccagatagcccttgacaagataaatcaagcagaaaattcccagatagttgacaaagagagtgccccaagggaaatctggactggctggtaaccaggtggaaactagatatcggacaagtccgcccaacatagcagctagaaaaattcctagcggataaaattgttcttttttcatttgatattttgatcctgataatcacgcgaacgtttgagtatgtccgaaaaagtcgcgacaatagtctcctgatagcgcttgtcctctacacgactcctaaccttttcaaaaataacttcttctctcttagtatctaaaatcggtttacctgaagctttcttataagcaaccaccccctcaactaaatgcattcgttcttctaacagtttgacaatttggtcgtcgatttgatcgatttcttgacgaataatatctaaatccatacagtctcctcctttatttgaattattgtatcaaaaagccatcaattaggctagtaaaatcccaactctcgataagaaaaatgcactgattgattacatcagcgcacttttatgtttatcctactttagcagccaattcttctgcgaattgttccaagcgttcaatatcttcttcctcggcagaaagatcaactttaacacactctgaacctttttctgctcctgttgacacaaagacacggtcaaagtcatcaacagccttacagaattcatcgtagaaggtatctcctgagccgaccactccgtagattttgccattcaagttgagatctgctaggtcttcgtagaagtccatcatctcatctggcaattcaccatcaccataagtataggtcgcaacgatagcgatgtctgcttccaagaagtctgaagcgtcaacagttgtacattcatcaacatcaacatccaagcccaagtcacgtaatttgtctgctacaatatctgcaatttcttcggtattaccggtcatactggcaaatacaatttttgctaatgccatatcgtcctcctcaatttatctttctccattatatcacatctttttcattttaaaaataaaaattcttgtgctacaatgaaatgagaaagaattgaggttatttatggagatttgccaacaaattttagaaaaaattaaagaatacgacaccattatcattcatcgtcatatgaaaccagaccctgatgccttgggaagtcaggtgggattgaaagccttgctggaacatcatttcccagaaaaaaccatcaaagccgtcggttttgatgaaccaactcttacttggatggctgagatggatcttgttgaagatagagcctaccaaggcgcacttgtcatcgtctgtgatacagctaatactgctcgtatcgatgataagcgctatagtcaaggtgattttctcattaagattgaccaccatccaaatgatgatgtatacggtgacctgtcttgggtcgatactagttcaagtagcgctagcgagatgattaccctatttgcccaaacaacccaactagccttggcagatcgcgatgctgagttgctctttgcaggaattgtcggtgatacaggtcgcttcctctacccttctaccactgcacggactcttcgcctggctgcttatttgagagaacataactttgactttgcggctctcactcgcaaaatggacactatgagctacaaaattgctaaactgcaaggctacatctacgaccatctggaagtggatgaaaatggtgctgctcgcgttatcctgagtcagaaaatcttgaaacaatacaatataaccgatgctgaaactgcggccattgtaggtgcacctggacgcattgacagagtgagtctctggggaatttttgtcgaacaggctgatggccactaccgagttcgcttacgcagtaaagtccatcctatcaatgaaattgccaaggagcatgatggtggaggccaccctctagcaagtggtgctaattcctatagcctagaagaaaacgaaatcatctaccaaaagttaaaaaacttgcttaaaaactgataaaatacttgccaaacttttcagaatctgatagactagtatagtaacaatctatggctcgcaaagagaccatggcagaaaggaaatattgcaaaatgaaaaaagatatccatccagaatatcgcccagttgtcttcatggacacaactactggttaccaattccttagcggttcaacaaaacgctctaacgaaacagttgagttcgaaggcgaaacttacccattgatccgtgtggaaatttcatcagactcacacccattctacactggacgtcaaaagttcactcaagcagatggacgcgtggatcgtttcaacaaaaaatacggtctcaaataatgataagagaacagttttggctgttcttttttgtttcttgaaatcaactgctgttttcatgttccagactcatctgtaggttcgatttccatgctactaggcaggaaggaaatagctgtttcaacacgtccataatgagctatactattgtcacgaaccacactttcattgatggtccaagtggaattcattttcttaaaagcttctcggactttttccaaatctttggaggcaatggcctgctctaaggtttcaaaacgaggacttatactcatctgctttcaaaaagcattctagtccatctccgattaccgatggactttatcacctccttctccagtccttgtatgacatcttgaagttgattcatgacatcttccaaagttcgaaaggctttattcttaaatccacgtttacgaatctctttccacacttgttcaatgggttcatctctggtgtgtatggaggaataaaggtaaaatcaatattagtcggaatatttaaggtacttgatttatgccatatagcattgtccataacgagtaaaaggataagcttgtgaaagctcttctaaaaaggcgttcatccacactcctttttataaacctgaaataaggcatcaattgtaacaaattctcctgcctctgtagccttcaaatgacgggcaagaaaggctttctcttcctcaactgtcatatatgcatggttacgaccaccacgtgtttcttgaaggagagagtcgagtccgaactcctcatatttttttacgtttcgccaaatcgttgtttgattacagtctaaaagctctataatctctttataagatttgcccatcagacgaaatatagtagattgaaactagaatagtacacctctacttctaaaacattgttagaaatcgatttgtcctgttcttgtttcattttactatagaacgatttgaaggcgtttataatatttagctgtacgagagtcttttaaaagtgttttgatggtttggatttcttctttagttgatttcatattactattatataatgctttttgattttagtctggtataaatattgctttcctccaaaatggtcatagttttactggcaaatctaacatatcacggataaattaacaagtgatttctgaattgctaaacattttcttttcttatagcatactttaagattttgtctttgagaaagatatttccaagaaaaacgttcgtttttttatctattttcaaaaaaaccaaaaaactgaattgaaagaatttttagaaaatttctgttttttctttacagtgaaaaaaaattctgctataatgtcttatgtaataaaatatgacaataaaaggagaacgatatgacatctgctaaagaatatatccaaagcgtgtttgaaactgtgaaagctcgtaacgggcacgaggctgaattcctccaagctgttgaagaatttttcaacactttagaacctgtatttgaaaaacaccctgagtatatcgaagaaaatatcttggcacgtattactgagcctgagcgcgtggtttctttccgtgttccttgggttgaccgtgatggaaaaattcaagtaaaccgtggttaccgtgttcaattcaactcagctgttggaccatacaaaggtggacttcgtttccacccaactgtaaaccaagggatcttgaaattcctcggatttgaacaaatctttaaaaatgtcttgactggacttcctatcggtggaggtaaaggtggatcagacttcgatcctaaaggtaaaacagatgctgaagtgatgcgcttctgccaaagcttcatgactgaattgcaaaaacacatcggaccatcacttgacgtacctgctggtgatatcggtgttggtggacgtgaaattggttacctttacggtcaatacaaacgtcttaaccaatttgatgctggtgtcttgactggtaaacctcttggatttggtggtagcttgattcgtccagaagcaactggttacggtttggtttactatactgaagaaatgctcaaagctaacggtaacagctttgctggtaagaaagtcgttatttcaggttctggtaacgttgctcaatatgctcttcaaaaagcaactgaactcggtgcaactgttatttctgtttctgactcaaatggttatgtcatcgatgaaaatggtatcgacttcgatcttttggttgatgttaaagaaaaacgtcgtgctcgtttgactgagtatgcagctgaaaaagcaactgcaacctaccacgaaggtactgtatggacttacgctggaaactatgacattgctcttccatgtgccactcaaaacgaaatcaacggtgaagcagctaaacgtttggttgctcaaggcgttatctgtgtatctgaaggtgccaacatgccgagcgaccttgatgccatcaaagtttacaaagaaaatggtatcttctacggacctgcaaaagctgccaacgctggtggtgtagccgtttcagctcttgaaatgagccaaaacagtcttcgcctctcatggactcgtgaagaagttgatggccgtctcaaagacatcatgacaaacatcttcaacacagctaaaacgacttcagaaacatacggtcttgataaagactaccttgcaggagctaacattgctgcctttgaaaatgtagcaaatgccatgattgcacaaggtattgtttaagatttatttactcaatcctcaatcactacgattggggatttttagcttgaattaaaaaattggaaaatctaattaaataaaatgaaatgaaataaaaactgaacaaattgattgcggaattcaaaccaatttctaacatatttctagaaattaatttgacttttctaatcgatttgttcatatcttatttcaatttactatacttacttgaccctttttatactcaatgaaaatcaaagagcaaactaggaagcgagccgcaggctgtacttgagtacggtaaagcaaagctgacgtggtttgaagagattttcaaagagtattaaacaaaaagaaaaaccgctactcctaagaatagcgatttaatcatgtttttaagctactactgtagttgctctattatttaagtgttatgaataacttcaatatctttaaagctttttgttagatttataatttcaactatagccatctctactccttagtttacagcaaaaaattatgcttaattcttattgtttttgtaaacaatcagcgaacccaatactattccattcaacaagcctaaagaaataccatattcaactggaaaatctaaaaaaattgcaaacactattccaatcatcacccctagtgaggctgttgttaaaattacatattcattttctttcttcattttctttacacctcatttcctttttgtatataagctgtagtactctccaccaagatccattaagtacttatgatttcctgactcaacaatcttaccacctttcattacaaaaataacatccgcatccttaatcgttgacaatctatgagctacaattatttgagtacagccctgactttgtatatactttgttattctttcctcattaatagtgtctaatgcactagttgcttcatctaaaattacaatactaggattatttattaatgcacgtgccagtgctatccgttgcctttgcccacctgaaatatttgaccccatctctgagatgatagtattaaatttcatcggcatagccatgatttcatcatagatttgaactgctttacaaacttcctctatcttttgtgaagtaacttcgtgctttaaagttatattatcaagaatacttcggttcaataaaaatgaatcctgtggaactactcctaaattttgacttaatatttttttatctatttgattaatatttacaccatcaaataaaacttttcctgtatcaatcttatataatcttgatggtatttttgataatagacttcctgcaaaactagaatcctagttcatgattgataataccagcaatcaaattcattcgtaatccgaagcgtttagatgatttcgataggttgttgaaatcattttaaacgtttttactttggcaaagatgttctcaaccttgcttctctccttagatagcgcatggttatagactttatcttcaattgttagcggtttgagtttgctggatttacgtgaagtttgtgcttgaggatatatcttcatgagcccttgataaccactgtcagccaagattttaccagcttgtctgatatttctgcgactcattttgaacaacttcatatcatgacaatagttcacagtgatatccaaagaaacaattctcccttgacttgtgacaatcgcttgagccttcatagcgtgaaatttctttttaccagaataattcgctaattctttttttagggcgattgatttttacttccgtcgcatcaatcattaccgtgtcctcagaactgagaggagttcttgaaatcgtaacaccactttgaacaagagttacttcaacccattggctccgacggattaagttgctttcgtgaataccaaaaacagccgcaatttgttcataagttcgatattctcgcacatattgaagagtggccataagaaggtcttctagacttaatttaggttttcgtccaccttttgcgtgtttaagttgataagctgtttttaatacagctaacatctcttcaaaagtcgtgcgttgaacaccaacaagacgcttaaatcgtgcatcggttagttgtttacttgcttcatcattcatagaactattataccatattttgtttcgcaggaagtctattgaaaaatctccagactggagaactcacggatagttcctaatctggagatttcttatttgcacttttcttgtacaactttagtccatggtaaataagcctctaaaacctctttgtttacgagagtttcctcgtttggaagacattctagaagataggatagatatttctcgctatttaattgatgacgtttagctgtttccaacaaactcataataatagctcttgctttagctccttcaaaactttgagaaaataaccaccctcgcttttttaaactgagcttaggctaaaagagtccactggactcttttactccgtcccataaccaatgatttaatggcgcgttcagctagattattggaaaggaccagatgtccgtctttcaaaatggtcttaaaggtttcttcatacttgaggctgtattcaattgcccttcctagttttgaacctgctaaaactgactgacgccggcactaagcaaagaagtcttccattaagggctggagatgttcttgacgtttctgtagtcgttcatcagctggcaaagcctcccagtctctttccaaggaaaataactgatcacaataagctaaacctttagctcctaaggatgatttatccgcttgcttgggggggcgcttcaaaaaacttccttctcacatgcgcccaacatccaacaagttcagcttcttccagttgacgataagcagacgagcggttcgaagtttaccaagcttagcgtcgccttgctcctaaaccttggactgctatcgcataggcagaactagaggactaaagtcctaagttactgccgcaaaatatcacaatgcacatagccagaataatctcctaggaattcttgtactactgaaccacttcgacactgatcatggtggtaaagcgtaatcccttgtttctctgctttacctgacaaaaaagtccaatagtaagtcagctgactatcactctctagcaccctataagaagtttcatccgcatgaagtaagggctgagtcaatagtctctctcgcaagaggttataaaggggctccaaatagtattgactcgccttgatatgccaattagagatttccttacgtgtgattggtaaacccatcctagcccaatcttcttcttggcgataattgggtaccttcagattaaacttctgatggatggtgtgagcgataatagaagctgagccaaagttatgcgctaaaggggctttaggaataggagatttcacaagcttatccagatgattatcttttactcgttatggacaatgctatatggcataaatcaagtaccttaaagattccgactaatattggctttgcatttattcctccatacacaccagagatgaaccccattgaacaagtgtggaaagagattcgtaaacgtggatttaagaataaagccttttaaactttggaagatgtcatgaatcaactccaagatgttatacaaggactggagaaggaggtgataaagtccatcgttaatcggagatggactagaatgctttttgaaagcagatgagtataaaaagaaagtcctcatttcaatagaaatcacgactttctgatggatttatagtaaaatgaaataagaacaggacaaatcgatcaggacagtaaaatcgatttctaacaatgttttagaagcagaggtgtactattctagtttcaatctactatatttttggagtgatagaaaagcccttcataagccagtctacttgttctggtgtgagagctttgacatccttttctgtacttagccaaatcaatctgccgttctcaaagcgtttatatagtagccaaaatccttgaccatcccagtaaaggactttaaagcggtctttacgtccaccacaaaagagaaagacttgaccggagaaaggatccaattcaaagtgggttttaaccagataagccagtgaatcgattccttgtctcatatcagttttcccacacacgagatagacctcccctaggctagatagatgaattgtcatagagcaacaccttatccaaaagctgttctaccatttcgagattgagagattgaaaaaaacttacttcaagcttgccaatacgaattttaagcagaatatcatttctctttttagaatcaaaacgacgagattgtggaatctctacaggaacaataggttgtggcattaaaatatcctccaatagttttactttactaatagtatacaggaggagctccatgaatgatagataccttgttatgacgcgcttactttctatataattacatttacgatttactaatcctaaatctagattagtagaaacattttcattatctaacaaaccaaaattttgaaaaagatatcctgatactgtcaataaaaaaagcttagaaaggcttaaagccttatccaagctgatatttgttcatctaattaataatctaaataaaggatctacttcactttcataatacgaactaaattggctctttctgcctcctctagtttcaattctatataatgaatagtttccgacaagtttggaataatcgagtattctaaaccatttacacgtctacgtgttttttctatttcatcagccattaactgacacgttttttcaacttctgccagtcttagtaatttataaattaaactattcattgtagcaaatacatcatccatttcactattagaagataaatagctgtattcactgttctcattttgagaagtaatattcatatgcattctaggaactgttacactcatgatattttctttctcaacaaataattcaatttctttcgatggaattgaaaataattcctccaccatttgagaattctttaatgatttagcaactgcaaaggattttagattatcaattagataactttccacttctttccgaagttgattattctcacgaatcaaagaaataaatcgcctcatcaattcatctcttttatcctttaataacttatgtccacgttcagctgttgtcaaacgttcctttaagttattcaattccatacgagttggttttacattcaaacgtaccatagataatcactccatttccggattaaacttctaccaaaggtaagtatttatcaagcaaatcatctttgatacgttttaactctgttctaggaagaattgatagtaattcccacccaagattcaacgtatcttctatatttcgatttttataaaatccttggtttatgtactcttcttcaaaacgctttgtaaacctcacatacaatttatctacatcagataaagccgattctcctaatactactgctaactcttcaacctttttcccttgggcataggctgcaaacagttgattcatagttggagcatgatctccacgagttttaccttctccagatcccttatcttttaatcgagagagagaaggtaaaacattgattggtggacgataaccttgattatacaactcatgcgacaaaataatttgcccttcagtaatgtatccagttaaatcaggaattggatgtgttatgtcatcttctggcattgttaaaataggaatctgtgtcaccgaaccttttttaccaactaagcgaccagccctttcgtatagagttgataaatttgtatataaatatcccggatagcctcgtctccctggaacttcacggcgagctgccgagacttcacgtaacgcttcacaatagttagtcatatccgtcatgataactagaacgtgcatatctttttcaaaagctagatactctgccgcagttaaagcaatgcggggagttgcaatacgctcaattgcaggatcatttgccaagttcataaataaaaccgaacgatcgatcgctcctgtttttctgagttcttccataaaaaactcagcttcttcaaaagtaatacccattgctgcaaatacaaccgcaaaattttcatcagaatttaaaacagtcgcttgtcttgctatctgagcagctaattcattatgaggtaagcccgaacctgaaaatactggtaatttttgaccacgtacaagagtattcaaatgatcaatagaggagatccctgtctgaataaattcatctggataatctctagatacaggattaatagcttgaccatcaatatctaaatatttctctggaattaaatctggtccaccatcaattggttttcccatcccattaaaaatacgaccaaccatatcctcagatacagccaattctaatgcatgaccagcaaaacgaattttagacttttctaaatttattccactagatccttcaaaaagctgaaccattgctttatcttcgtggatctctaaaacttgtccacgacgaatttctccattatgaagttgaatttcaactaactcattgtaagacacattatttacttgttcaacaatcataagaggcccaacaacttcactagcagttctgtattcttttataacactcatttatagacctcctgtttctaatatcaaatgaatttgatgtgtaatctcatttgatataattttgatttcatctaatctatcttctgaaacatatttacttctcgccatacggtctcgaactgccacggtaccttccataatctctgtaaagtaagaacccaactctaaagcatgatttgcctgatcagcaaaagtgagaatattacttagcattgcttcttgttttgcaaacgaagtgaatgtatctaccgaatcaaaagcgttctgttgcaaataatcttctcgaatttgtttagcaatttccatcgttagtcgttcattatcagacagagaatcaattccaacaagacgaacaatttcctctaaactagattcccgttgtaagtagttcatcgcacgagttattttactattccaatctgtcttctctttaccatctatataagtgcccacactgtctttatatagtgaataagatgtaagccagttaattgcaggaaaatgacgtcgctgtgccaacggagcatcaagcccccaaaaaactttcacaatccgtaaagtgttttgagtaactggttctgaaatatctccaccaggtggcgatacagctccaatagcagtaatcgttccttcacgttctggaagccctagaacctgagaacgtcctgctctttcataatattcagcgatacgacttcccagataagcaggataaccctcatcaccaggcatttcttctagacgtcctgacatttcacgtagcgcttctgcccaacgtgaagttgaatcagccataatggcgacagagtagcccatatcacgaaaatactcagccatggtaattcctgtataaattgaagcctcacgagcagcaacaggcatatttgaagtattagcaatcagaactgtccgttgcataattgattgtccggtattagggtcaatcaactcaggaaactcattcagtacatccgtcatttcatttccacgttctccacaaccgacataaataacaatatcaacattggcaaatttagctacttggtgttgtacaactgtctttcctgctccaaacggtccaggaactgctgcagctccccctttggttactggaaagaatgcatcaataactcgttgacctgtgattaatggttcttctggaattaaacgtttagaaacaggacgcgccttgcggacaggccatttttgcataagcgttcctttatagaaactaccgtccaatttttttatttcatatacaacttcatcaattgtaaaatcgccagatgcaatagaaacgacttctccagatactccataaggaaccataattttatgattaactacctcggtttccttgacagttccaagaatatcacccgtactcactttttgaccaattgctatagtggaatcaaaatgccacttaatatctctatccaaacttggaacttctaccccacgaactagaaaatcattatgagtagccaatttaaatcgatctaatgggcgttgtatgccatcaaacatttgagaaatcaatcctggccctaattcaaccgagagaggttctccagttgtaacaacaggttctcccggaccaagaccagatgtttcttcatagacttggatagatgcctgatctcttctcatttcaataatttcaccgattaaccctagcttacctacacggcaaatatcttgaatattagcctcctgcatacctgatgcaataactagaggtcccgatacttttataatcttcccttgagtcaaagttattctccttactaagtccaaaaattatagaataatattacagacaattttgtacattattataaaatattgtgtcctactgctttctctacattatcctctatacgttttaatcctaaatttaaaccttgtttatgagtcggtaataaaataatagcaggcacaacttgggaatcataatggcgaattgtatctaatatcattgaagcaatgtcttcagtgatataaatgacaccataatcagattgagctaattttcttagtgtatttatagcttcttgttcttggtaggcaggaaatatatcaaacccaatcatgctaaatggtaaaataatatcacggctaccaattatgccaattttatacttattagcttccataatgtgggcgtatcctttcttttattgattcaaagggaattgtattttgaagagctgatatgatcattctgagattctttacttcaaactcacatcccaataaatatctagcaagaactaacggcccctctacattgtaccttccttgatctaaagttttatacaatagtaaatcacataaaaattctaactcagaagatgaaattgttgcgtcctgcatcttcaattcataagttgaaaagattgaatctaagcttggatttattttattgaaccacacaaatatttcttgattttctacaatgtatataaattctttagcagaaatacttccttcatctgaaagtaattgtaaaatatccccatgactcttattttgagataaaccacgttttacagtaataatattataaaagtcaatcatttcgacaataacctgagacagtacctcatctaactcattagataaaagtttcagatgtttaaaatatgctagatcagctccgacatcaagtacacgaatattattaaaagtttcatactcattccaaattgattctacttcacgaaccataaaatcaggaagtgtatctgaatgtaaggaagaaactaaatgttttaaactttctatatcaaaaatccctattggaattaataatttagaaaaatctttcttaattgccgccttagattttaataaaactttgatattatgataaacatatcgtaaagcaaataaagtcacaattatatcagacggactttcagcataggcccatctataatcattgactaattttgtcattagcgaaatctctgtctgactaggatcttctaagatgtcaatcgataaatgatagggagttgattctaagataaatgccaatgtctccgtatctttggattgtataattttttgaaatttttcttctgtaataaaatcgttttcttttaccgaaatcgtcgtatttatttttgaaaaaagattagtatccataaaatacctttctaattttattggaatactccaaatttctaagaaggattaaccaatttcatccttaattgataaaaatttgatttgcgatacttgaactttcttccttagaaatcgatccaattaatgttttatacaaatagttatcatcaattttacctattgaaataagtaagcctgattcatttgagataggttgttcactaaataaataatttggaaaagagaatttcaatttctctaattgttccaaattgaatttagctaaagtccgttccccaaaggttactatgacctcttgttgtgaatatcgttccagaattcgatagatgaactccatttctttatctgcactccaagattccatttctagtaaagcagattgaaaaagttcttttaatattttctgttttgatactaacgttgattggcgttccttattttttaattgttgaaaaattatttgatatttctgttgcaattcttttaactttcgttcatgttcagcttcttttttctttataatgagcgacttttgcatttcaaattcatcatcaatcttctttttggaatccaataatttcatacgccctttttcatgagcttgttcaataacagactctcgtaagttttctaaattgctcatttagacacctcctttgaattgcaaatttatttcttatacacgaagggtcaaaatgaatgatacgacaaaagcaagaattgcataggtttctaccatggcagctaaaattgctcccttcatgaattcttttggtcttttagccaagatttgcattcccgctactgctacatttccttgatgcttagctgaaaagtatcctacaatagcaattggaagagctacaaagaaataagcaacgcctttttctaaaggaagttctggagttaattgcaaccaaattaaaattccaataacaaaaccatataatccttgtgttccgggcaataattgcaatatcaaagctgaggcaaacttttcaggctgttctttcagtaaagctgcggcagattgcccagccttaccaactccataagcagaccccataccgcttaatccaaccgccaatacaattcccaatgcagcgaagaaagctcctccataggttgaaaaataagttgctaaatgttccattatatatatcctccattaattctttgtaataaccttaatatatttctcagaagccttcaaaggttgaaatggttttcctccaccctcataaaacttaccaaaaaattcaacaaatatcagacgtgctccatgaacatatcctgatagtaacgatagaaaaatattgatcgcatgtaaaagaatgaataatactaatccaattgtcagtttagccaatattcccggaaacaaaccaacaattaaattgaaagctgatgctatacttgctccagataatcctaatgccatcaatcgagtgaaactaactaaatcacctatataagatgaaatgttatatagattaaacaatcctgctccaatacctgacaagcttttggtttgaataatagaaacaatcaaaatccccacagcattaaaaatagatacccatttccctaatacaaataacggtctcatatcaggcatcaacattccaacagcaataaataacaagccaagcagaataacacaccacgcaaatcctgaattatatgcttctgcatatttattcattcttactttttgtagtcctgaagctaacaaacctgcaaatactgtaataaacccaaacacaactgacactactaatatagtcatgacatcagaggttgtagatatcagatgaaatggcaactcatatccaaaaaatgagccatagattccaccccaaattgcaacggctacccctaatatattaaagaattttaaaaatctcttagttgctgaaggtagatgaaaaatttttaatgctaacattgttcctaaaaacaatagtaaaccatagcctaaatcagcaaccatcattccaaaaaatgtaaagtaaaatggtgctaatacaggtgtaggatctttctcataatatttgggcagagcatacatttctgtcaataattcaaatggttcaattaaagaatgattcgttaatttgataggtatttcatcttgattatccgtcaatgtttccgattcataaatataaatagaatgtccaaaatgctcatccataacttttataaaatataaaatacgagtttcttctatccatccttctaatgcaactagatgcggagtgcacaaaaagttattcttagagatttgacgagcatagatagataaaatatagtctatttgccattgtaaatctatcaaatatttctttgaatcttgcaacgatgcgataatattctctttttcagttattaactgcatgttttcttgatctaaatctactactcgctgcttcggtaattcctttctagaataatcaaatggttcaaataagtattcatcaaaatctatagagtaactagactgatagaaaacaacaacaccgtactctctatcattagaaaatatttcttgaacttcaatattgttttctaaaagactattgtataagcgattatcttcagtccttggaattgttccgacttttcctttacagaaagaaaattgttctaaattcgcaggaacaatttctaatttttcccactttattaatcgctctatttcctcattattactttgaatgtgtctttctaattcatgaactctgttaatttgatgattcacttttttaagaacaccctcagcaacattagctttaccaaatttctctaattcttcataagaggtagttatcggaggttgctgcaataatttaaacgtgttttctttcggtaggtattcttgtaatttctctacagttgcttctaaatgttgttgttgattcatcaaataagtcaaggcatcatttccctcaataaccccatgattggaattagaagtatgaaaaatttgaatagttggaaatacaacttcatctttttctagagcttctgaccagttatcctgaacctttaaatcacggaactgcactgactctagttcttgaatagtttttaaaacatcatcaagactacttttagaaaatagtagagagattcttttcatctgactaatggccatatttttctaccaccctaccaataattttttctacaaattctcctctcctacttgatgaaatatactgaatatttgcatcattttccttgattgttttattaacctcatcaataaggttctgttgtttcatttctaaattgctttctattgaaactaattcttcgtgacttttttcatcataacttttttctagtttttccaattcttcttgggaaacagctttataagtataaatctcattatcatatgattttataatatcggttgcaacattctcaatatcttgcattgtcgaaaatacagagttagtcattgtgacacctccttatcttacatactatttattagaaattctatctaagaaattttttacagctcctatacgaccagcttcatttcctaatgtagctgccacaagatttttaggtaaaaacctattatccattgcatttttagctaaagaactttgaatttcaggtaacaaaatatccttactatccagaatcccacctcctaatatgagaatttctggattaagtagataagaaatcgttaataaaccttttgttagattttctacaaaaatttcaaaagtttcttcagcaactttatctccagatcttaaatcagtgaagaaagtacgtccagtttgattagttttcaagctctttttttgatataaatgaatcaatgcggttgttgaggctttactttgccaatccgaattacctacaggaatataacctacttcaccagcagtatagttaaatccgttaacaatttgtccgttgacaataatactgcctcctatacctgttccaatagtaaccattactacatttttcttatctttggcttgtcccttccacaattcacctaatgcagcacaattaacatcattttcaacaaaagtatacaacccaaaacgtttttctatttcggcagtaaagtttactccgatataccctggtattgtatagcctgcatagatgatttctccagtattagcattaacaactccagcagtggaaatcccaacaccatcaattgaatgatttaaagtatactcaccaattaaatcacagacctgatttaatatctgattcgttcccaaatcatagtcaataattgtttctatctctttgaaatgattcaaactcgttccaaactcatcgtataaatctgccttaattgttgttccgccaatatcgatacctataatcttcatttcaacactcccacatttttgatctcattactttttgataaaaaatgggactgggcattatcccagtcccatctctatttctttattcaatgagttgtatcacagaactttagaaattatataatgacaagaatttactattctgttttacaaaagttaagcatttgtgatttctgaaagacttacttttcgatcttctttaactgataaagtacatgcatcagcggtagcgattgattctaaagcagctacaccattgagaagtttttcaaattcttctgtaatttctccacctttaatgatgtcatgtagatattccatttctttatcaatacatgtttgcaaccataatgggcaacgtactcctggtttaccgtacgcaattgctccatccataccacgaccggtatagatagctgtacgatcatcatcttcctcttgagtttcatgaactaagaagtgtgattctccttcacctttaacacgaagagtaccgccagtattgaacaagtcaagtttgatagctccttcagttccttgaatcaagacgtagtgttcaccccaacggaaagcattaccatattccaaaacagcataacgatcatcagagtattctaagtttacaatgagcatatcatcttcatcaccaaagttttcacctttatgatatacattgcctcctaccattgtcgctttttcaggaagtcctcccatgataaactgaatgcaatctaattcatgaatatggtggtacaaatgtcctccagattgagaacgaagtttcttccatgatacagttggttgttgttcttcccaacctgtacgagcagcatggcaataaagaactttaccgattttaccttgagtaatcaattctttagcatggtgtacaccgttaaagaagttcatgatgtgaccagccataaagatgacattattttctttacatgcgtcaaccatggctttacaatcttcataagacaatgcaattggcttttcacaaaatacgtgtttgccatgttgagcagctttcacaactggttcacggtgaaggtagctaggtgaagctacgatcacacaatcaatatcttcacgtgctacaagttcatctaaacttgcacaaacatctgatcccaactcttgagcaacttcttctccatgatttgggtcaaataccgcaaccacttttgcatcttcaattttgttcattgagcgagctaaatcagctccaaaatatccagctccaacaataccgtaatttaccataatttttatcctctttttatatattttcaaatttcagctttaattctttttcagatcttcaatcttaaatgttatatatggtacaacatttttcatatgaagttcattacgagaccatgaatcaaatttttcaaacatcaatccaatttcatgatttggtaactctgtcaatgttgaatatgagtatccatagttactataatcaacgtcgtgatgataacgccaatcaattgtattatcatcattaattagaccaatccaaatttgtccgtgtttacgaccatttgtggagtttggagtacttaaaatgacagcctttttaccatcaatcaattggctataattgatgattgataattgtgttccataacttggatttgaaacaaatttcaaatattccggtgcactccaagtagtacctgcgtctttacttgttaaatatgcaattttaccattatttgtacgcatatatgcttgaattactcctggactcaattctacaaattgtgcttctgctgaccaactagaaggaagtggcactactttaactttccaagatgctccattatcgtcactataaatgaacgcagactctttaccagtgtaagacggaataagaatacgtccagttgagctttcaatgattccacgtccaggacctaaatatggcgcattccgattaagtcccattataggaggtaataaagttggtgcagaccaagattcgccatgatcattgctagaaatatatgcaatatagttcgttggcactactttaaacaatgcatctttgtagaagatattcatatggactttagtcccattacgatattcagtctttttattattttcaaatgaaaccgaatattgctctaccgtcaaataattaccattttgtttaataccgaaatttttatctactgaaaattcagttggtctgttggtacgatcgtcgtatacagtaccattctcacgaatagtataattgtaatcagtatcaccttgtttccttaatttaaggtaataattaccatcaatttgtttataacctgaatcttttctagttgcttctctaaaacttactccagcaggcatcacatcagcaaacatgagtacttgtttgttctttttttcaacaataacagagtcaatataggttgcaccaccgctgatttgtaagtcacgtccaccaacttcacgaggccattctaatggtactggcgcaaaatcatcgaatgccaatgttaattttggtttagtccatgtcttaccattatcatcactataacttgtagcaatattaattttattcaagaaatcatgagttccaccgtaacgagcgtcaatgcttgaaaatacccgaccattgctaaaagtatacagaactggaatacggaaatagttagaacctgttgtatcattagccgtataaattaaatgtccagtaacagcgtttgttgtcatctttttaacagtttcttcatccaatgcactattaaagaatttgatattttctagtgttccgttaaaaccaaacgccgtttttcctgcacgtttcactcccccaagcatatagtaatcaatacctttaatatccttgatgtttaggaaattatccactttcttttctactacttttgtaccatttgcgtataaagaatatgtttttttgactgaatctgctactactgcaacagtgttagtcacagcctcttgtttgtacttaccccaaactgaagcaggtctggatactaggttatttttattggaagaagtatcacgcgcttccatccccaactcaccattgtctctaaggaacacatctacataactattttgttgaccgggtttggaattagatattccaaacagagcttgtaagcctttctcacttgactgattgtacttaatcactacagtaaagtcaccgctagtaaatttatcctttaactctttagtaacattttctccgccccctgttaaagtaacattatttttttctaagacaggagtttcttccgctgtagaagatggatccttaacagtagtttcaactgttcgaggttgtacagtaacttccgaagagttatccgatgtaggttgtacttccgaaatcggagtcgttggtgcaacaggttgcaccaactttggtgttgatacttcagaagtttcagtctcctgagctgcaactgagttagcaacaaatgctgataataccactacagtacctaaggttacatattgtttaatattttttttcattttatttttcctcgtttaaaactttgataacaagttttttaacagtttcatcattgcaatgaatctttggttggtgaagatcttcttcaaaagtcaccaacatattccctggaagcaattcaacaatttgatagtctttgctatcgtaaaaagcaatatccttctcttcgctaaaaggtacacgtgactgggcacgaactggggaagttactgccattttttcagtattttcaacaacaatatgaatatctaaatatttcttatgagtttcaaaaatatctcctggaactccatcagctagataagtcatacaatttgcaaaaacattttccccgtcaatatcaatttttccatcaactaaatctgtcaaatttgtattttctaaaaaatcacagacttttgaaaaatatttattgacagaagcatatcgtttaaaatcagattgttcagaaataatcatattattttctcttttctattagtgacgaacttcccaacttgaatccgctttaatttctgtaatatcatgaatcgttgtatatttaggtgcagatactttatttccagtaagaacagatacaatataacctgaaactactgatacagagattgaaatcaatgaatatgcccagtagctaacagctgttggaggaaggaagtatttaataaataccatgacgatggttgatacaatcagcgctgcataagcaccttgtttatttgcttttttagaaacaaatccaagaataaatacaccaccaagtagaccaagtacaagtcccatgaaactattgaaccattcgtatgcagatttaatatctgagtgagccatgacaatggaaacaccaattgagaataaacctactgctagagatacgaattgtgcaattttcgtacgacgattgtctgacatatttttagaaatgacatcttgaatatccaatgtccatgaagttgcaacagagttcaaacctgttgaaatagttgattgagatgctgcataaatcgctgccaagatcaaacctgtgatacctactggtaactggtatgcaataaagtacataaagatttggtcttgagggatattgctagctgcactatctgcattttgtacttgatagaatacgtacaagcctgtaccaatcaagtaaaagactgttgcagttgcaagtgacaaaacaccgtttgtgaacaacatcttattaagtttcttaatattttgtgttgtagtaaaacgttgaaccaaatcttgagatgaagcataggaagacaagattgtaaagcctgaacccatcacaattaaaaagatggagtttgaaagcaagttaggatcgaaaagtttttcatttgcagcaaggaatttcccgtttgctaatgtttctgctactgcaccaaagccacctttaatattagcaatcagtacaaataaagctaaaacgacaccactaatcagaatcacaccttgaataaagtctgtccataatacggattttagaccaccagtataagaataaacaattgcaactacacccatcaaaataatcaaaatattgatgtcaattcctgtcaatactgataaaccagctgatgggaggtacataatgatagacatacgtcccaattgataaataataaacaagagtgctgaaataatacgaagtgctttagaattaaaacgtttatccaagtaatcatatgccgtatcgatgtctatccgtgcaaagataggtaagataaaacgaattgtcagtggaatagctactaccatccctaattgagcaaaccataaaatccagctacctgcataagagctaccagcgagtcccaagaaggaaatcggactgagcattgtggcaaaaatggataccgaagtaacataccaaggaaccgaaccatctcctttaaagaactcttttcctttcatctcttttttagagaaatagatacctgcaaccaacaccgcaagtaaataaacaatcaagataattaagtcaattattgtaaatcctgttgtgcccataacatatctccatattgattttatttattataaaaattcttttcgtgcttgttgaataagttctgctgcttgttttgcaacttccaagtcaccttctgccaatgcttctaaaggttgacgaacagaacctaaatcaagtttttcatttagacgcaaaacttcttttgctacagcatacatatttgccttacctgatatcatcttatagataacttcattgatagcatattgaagttttttagctgtatctaaatctcgttcttgaatcaaactttccaatttcaagaacaaatctggcataacgccataagtaccaccaataccagcttctgctcccatcaagcgaccaccaagatattgttcatctggaccattgaatacaatgtaatcttctccacctgcagctacaaacatttgaatatcttgtacaggcatagaagaatttttaactccaatcacacgaggattttgacgcattgttgcatacaaactaccagtcaacgcaacccctgccaattgtggaatattatagataataaaatctgtatttgacgcagcttcactcattgcattccaatatgctgcgattgaatactctggcaatttgaaataaataggtgggatagctgcaatagcatcgactccaacactttctgaatgttttgccaattcgatactatctttcgtgttattacatgcaatatggttgataactgttaatttacctttagcaacttccataacagcttcaataatttgtttacgatcttctacactttggtaaatacattcacctgaagaaccatttacatagataccttttacacctttgtcaatgaaatattgtaccagagattttacacgatcttggctaatttcaccattttcatcatagcaagcataaaatgcagggataacgcctttgtatttagttaaatctttcatcagatttctcctttatattgttttttatttgatgacattaataaatcgctgagcaatttcttttggacgtgtaatcgctccaccaatgactacactggtaacacctaaactataagctttttttaattgttctggataatgaatttttccttcggcaattaccggaatattaaaatcagccaattttttcattagttcaaaatcaggctcatctgattgtacacttgtacttgtgtaacctgataatgttgtaccaacaaaatcaacgcctgatttaaatgcatagagaccttcatctaaattacttacatccgccatcagcaattgattcggatatttttcttttatttttttgataaattcactgacaactaagccatcatatcttggtcttaaagttgcatcaaatgcaatgactgttgttccgcattctacaagttcatctacttctttcatcgtagcagtaatatatggttcttgaggtggataatcccttttgataattccaattattggtaaatctactactttctgaattgctttaatatcacgcacagaatttgcgcgaatgcccactgctcctgcctctaaagctgctttagccataaaaggcatcaagctaaattcttcattataaagggcttcaccaggtaaagcttgacaagaaacaatgactccaccttgaacttggcttataaatttttctttagtccaaatttggctcattttattattcctccttatggataatagtttgattgtaataatattgtctctctggactttccagataattagagaataagcagtctgtaattaaaagtattggaaactgaggtgatatgcgattgccatacgagagatgatcggtcgaagctaataacaatagttcatcaaagaaacaatcttcttcgtcaaattttcttgtagtcattaaaactgttttagcgcctttatctgcagctttttgtagaccttctagtacaatatcagtttgacctgaaatggatgctccaatgacaaggcaattttcattaagtagtaagctactccacaaaatcatatcctcgtctgataatacttcaccaatcactccgagacgcataaatctcatcttcatttcttgtaaagcaagaacagaacttcctttaccgtagagatatacacgctcagcagtttctatcatctcagcaatacgctcaagttgaacttcatcaagaaccgtgtaagtttttctcaacatttcctcatagtcggataaaactttttctgttgcctctgtatataatgccaacttttctttctcatgaatcatctcttggtatttgaaaatgaattgtctaaaacctttaaaaccacattttttcgcaaatcgagtcaatgttgctttggatacattaaggtattcgcacaatgctttagatgaataatcattcagaggttgctgttttaagaagaatttagcaatgtctttttcagcatatgccatatttggtaagttagcttctatcattggaattagttctttttgcagtaacatatgagctccttagttgaagtaaacgtttacattctttattttaacactttttttttttttcaatatttttcataaattagaaactagtttccaatttctttcgtttcataacagaacaacaaacataaaaatataatagtttttattctttttatcgtaattatatgtattgtaagaacgtttatcactaataatatgttcatattaaaatattttagtaatattttattttggttttattatttcttttcggaatttctatataatattttatttctaaaaaaattgaaaaaatatttctagtttctttattttatataggtaatatattttatttctaaattaaaagagaatcccataaaaactacagatttatgagataaatcaggtcacctattttaaaaaagcagcaaactataaactaaaaagttccacaccaaatgtaaccccatacttccccataagtcagatttatagcgcaccatacctaaaaacattccaagtgaaacgtacagacaccaagctagaatggttcctggatgatgtactaaggcaaataaaacacttgtcaaagcaactcgaatatctaattttctaaccaagttccataaaatttcacgatacagaaattcttcaaccatactcgcattgattaagaacaataaaaatgaaaaccaaggaacttgatgttgaaggccaattaaatttgtttgattcgtgcttccttgagcatgaatcaggctaaaacatagacttataatcagtagactagctagtccaataccaaggcatttcatcctagttttcatattgaccttgaccacttgttttcgttgaccatacatccataaaaaagaaaaaagagacgcaccatagagaacctgtagtatagttaactcaccgatacaaagaaatttcaataagtatagagataccaataggacatttacttgttggaatatataaactggaattattcttttcatagttacctccgaaataaatcttcataatctaaatctaatatctgcacaatcctttctacccatggactttgaggcattcgttgttccatcttgtagtggcgaatcttttgatataaacgattcaattcacttggatagtgaaactctcccgcaaacatttttctggttaactcaatccagctgatatttctttcagccaaaataatggacaagttctcccaaaatcgttcagccatattacttctcctttagttagataaataatgtgtttgtgccatgtaaatcaattgtttcgtatctcttggcaatagagctctagcctcttccaaattcagacttggataaacccgcttatttgaaaccacaaaaggaagtccgatggttagttcaggattttttaaaattatctcaacgaaatccgttaatcttagattgtcacggttcttaaatcgtaataaattgggagataaaaactcaaaacaatctgaagaatagctcatcatctcaattaatttgtcctttgtcatttcagaaactgaatgacaagatacctcaatgccatagttttggaagaagtctaaaagaagttgatttctttggctatttttacttagatagagatcaatcatgggagacctccaacaaatttgcttccatttgatattctgagacgattaaggaatctaacaactttgagaagttaatcgatttcttgtcttcatcataagcttttacagttacttgggttgtaagtatcccctcttttccctcggctcgatagtcttgtcaatataaaacaaaaacaagattctgattatcatctacaaaggcattaactccgttctttatatcctgactttcaaggaattccataacgttttgaagataggattcataaaatagtgggtaattatgttttttatggtaatcatctaaaaatgttacctcaaactcacatggataattgggcatcaaaaatatttgttcatccagctgtttgatttctgcatcatgtaattctgtttctaattcatcacaatctagtattgattctttatttaatgcttttatctttttcctctatttcttttaatttctttgcgattgcggcaatcacaggaacggttacactattaccaacttgtttatagagctgactattaatagagacttttctagcagcttcaaaagcctaatcaggaaagccatgcaatcgaaaacactctttaggagtgattcgtcgtattctcaaacggtaaaattgtccatctattaaaacaccagctacttggtaaacttgtttatcttctccttcatagctagccactactactcccatttgaccactagttgttaacgtattagctataccttttccaactctaccacgacgatactgagaacttggtctttctaaattgattgaatccccaatctctgcttgagcatatccttttttcgttgcttcccgtacttttagaaattggattggttctggaattagtattttggggattttatctcctccttgcatcgtagtcagtgttggagataagccctcacttccatagacacgacctgtctccttaaagctagtcggtaaatctccaacaacgacaatgccataacgatcctgagtatttaaagtaaacatcggctcttgattttccttaaagcgtctcccattttgtctcttgtctaatctatctggtgtcatacaaggaatcgcaactttaaatccttctcctttaccacgaactaaggttggcgcaagaccttctgaataatagactttaccgctcattccacttcttgatggattcaaatttcctagtgctttcaaagtctcagagttagttgcttgaccttctcgtctgaaaggaaataagagtctggtacctttctttctagaatgtccgataataaacaccctctctctgtttttgggaacgccaaaatccttactgttaagcacctgccactcaacatcaaaccccaactcatcaagtgtggtaagtattgtggtgaacgtccgtcccttatcgtgattgagtaggcctttaacattttcaagaaaaagaaaacgtggttggatttgtttggccgcccgagcaatttcaaagaacaaagttcctctagtatcttcaaatcccaatcgtcttcctgcgattgaaaatgcttgacaagggaatcccccacagatgacatcgactttccctctaagttttttaaattcgtcatctgaaacatctcgtatgtcatgaaattctatttctccttccgtttgaaaaatggacttataagatttcctagcaaatttatcaatctcacaaaatcccaagcactcatgcccttgagcttccattcccatcctaaagcctcctatcccagcaaataaatctaaaacccaaatcattcatacctctctcaactagatgtaacttacaaaacccctgacctcatgagccactttcttcctcctcatgaggtcagttttactttctgctgttccagtatcgtttttcctcgctagatttcctcaaaagggcagactcctcccttggttcgtcacacgattttttcatctcgactgttctttaatgcatcattaacgacgcttttcttctaggtggttcataaggaacaggaagattcaggttgacttttctaatcctagaataaagtgctgaaaacaattcggaataggcatagagactagacaatttgaggagctgcttgcgtcctgttcgaacacattttcctaccacgtgaagaaaaagatggcggaagcgtttgattgttaaagtttggaagtcacctccagctagatgtttgagaaaaagatagagattgtaggcgatacagctcatcatcatacgaacttcgtttttgattaaggttgaactatccgttttatcgccaaaaaatccctccttcatctccttgatgaaattctcggcttgaccacgtccacgataaagctgaaactggtcttggcttgttccactcgtcatatttgtaacgagagaaataacatcgtagaacaagtttccttcttttcgttcagagaactggcagacacgacgcttgtgcgaccaagatcctgcttgatagagagtttctgagtaggcggagtggggcaagatggttaagtcctcatcctgtgggcaagggagggaaaggtctccaagacggctcagaacagtatttttcttgagttttatgaggtagtattgccctgttttttcaattaaatcgtataattttggggtcgcaaagccactatccattcgaaagagaagttgattaaaccgttctaaaacaggtgtgataaagctgtctgcctcttcagaacaataacgattaccaggacgaagctgggcattgaaacaataacctgtcttcccctcgaaagcataaagaggatgatagccatgagcacgatagtgggcgttataagcaacaccttcttgcttgccataagttgtgaaatgggtagaatcgatatctacaatgagttggtttagctggtgaaactgtaaaaagaattcgaccaattcaaggttgaggcatcgcaaactatggactgtttcctcgtcagttctggaaagaaaacgggataaggttggctgtgaagcaagctgccctccttccaataattttggaaagtaggcatcagctgacaattctttacaagcatagtccgttccataacctgttaacagttgaaagaggaactggacaaggatatctgaatccgaataacgacagtagcggcgttggtcattcgttactaaatacttagaaatccgctcttttagtttcaactgggaaaaaagttcctgaaaaaagataagaccaccatactgggttaaatgacctccatcgaaagatagttggtaaaaagacttgttttggaagtgatgatttggtaaactgttcatgtgagtttcctttctttttgtgtttttttctacacttataccataaaggggaaactcttttttgtctagtaaaaaacacccattgggtgaaaaaagaaaccatccaggatctaagctaaggcaaggattctggatggtttttagatttggggtgaataattggggtttaaaattgtctaaattcgacagaaggaagtagcaagcattgtcgctaaaaaaatgcatcaggttatcctgtgcatttttttgatatcaaaataatcaatctcctttatgagctaattcttctctacaagctctttggagcagaacaactgtaagtataaaaaccacacataaaatcaagatacttctctcagccccaaaaacaccactagtatataaatcttgacccgttaaatttgtactgaataaactaaatgaaacttttatcccactcactaatactattatatcaacccactacagttgacaaaaagacaaaccagcctaatgactagcttgtcttcaatcaagagaggattctgttccccccatataagcactaacattccaacgtgcacatattggaacgacatccataactccagagaatctctaaagtttacaatttaaatgaattaacaattttcccaactaaaagcactccagttaccgcaacggtttgtactgaatgtactaaatcgcattccatcaacttcatctgtttcgtcaacttgaacagatactaattgaagatttaatacttctgctgccatagctagctcctcctatttaaatttttgggattaagtactttatccaccctcatatactctctccaccagtaaaatgcaagcaatgatacaaaatagatttaactattttatatagcgaaaacttacaaatttttaagaaataatttttgcattcttaaagataaaataggaacttttagtaataaatattaaaataaataaaataatagatactataaaatttggaagtattaaccccaaaagattcatatcatctattaaaatatcctctaaagagtagtatattaaagccataattttaatgttaagtaaaaatgcaattaatgaagtaacaaatgtcaaaaatatagcctcaccaactttaatcttaaccatctggtaattagaagttcctaaaatttcaaattgctgaatctcaatcctttcttgatgcgatgacaaaaatgcaattgaaataatatttgcaagtactatcaaaattggtgctcctacatagacaataaatgctacttttagctctaaatcactgtcatcttgaaattgagatagtatattctgagaaatcatttgaaaactagaaattagtaatatagctcctgtaattgcagcactgatagattttatataagacttacaatatagtaaattccacttcgaaacaatgaacataaaattatttctaaatataattatagaaagtagtttgataaaacatgactgtataaaaggagataattgataaataatcacaatatctaagattacaatattgaatattatctgggccttcgctaaaattgtgctatcttggaaaatttgttgcaaagaaagcaaccagataacactaaaaccagccaatagcagtattctttttactattgaaagaacatgccttattttagaactcttcctatttctaatcttcttgaacgtataaaagcaaccacttagaaaggctaaaaatgaaatcaacactactgtaatgatacatccaacagcactcgtttgaaattggatatcaggtaatatattttccccgaaaaagtattgtaaaaaataataataatttgacgtaacaaatatagagcatagatatgcaataaaactaataatcgaggaaatgataaaaatctgtccccccacaagaaatgatagttgaaggcgacttgctcccaacacctccagaagttcgtaatcatctctaaaaatttcaaccaacatatttattatgttagagagcacaaagaataatgttactcctccgaatactatcggaaacataaaaattggtttaggatctggaagtccgacaaatacttgcgaattattctcaacattaattaccccattaacagccaatcccataactaaactcgaaacaaaaattactggtgaaacgcctaaccattgtttcttattatgtaaaaattgatagtaaactaatctgagcatctctattcctccgtagttgattgtacctctaagattttatacaactcttccccgctaggtctatgaagttctttgaaaatttttccatctttcaatattaatgcacgatcagttttcgaggccaattctatatcgtgcgttaccataattacacacttacccgcccctactaactctctcaataattcaaaaattacttcacgagaaacgctgtctaaagccccagttggctcatcagcaaatattatatcactatcagcaataaccgctctagctatagcaaccttctgttgttctccaccagacagagttccaacaaaatcgtttaagccagcattaaacttcattcttttgagtaagttttctacatttttaatagttaattttttttgtgataatcgcaaaggaagtgctatattttctattaccggcagggaaggtattaaattgtatgcttgaaatataaaagatacttcgttacgtcttatacttgacaattttgcatttctgattttataggggttgattccatttaaaattacttccccacttgttggttcaagcaaactagaaatacattttaataaagttgactttccagaaccactaattcctagaatacttataaattctcctctcgaagcagaaagagaaacatttttcagcacttgcaacgttttattatttcctagtaaaaattgatgatacagccctttcacttttaatatataatctttatccatattcttgcctccaatcacttaattttgaaaagtgttccattttccaatttatatatatcagtgtatctcttgtcatttaagtcataatgatgtgaaacttcaataaatgaaatacctaaattgaacagaatatcatgtatggaatttgaattatcattatctaaattagctgatatttcgtcaaataagtacactttattatttctaatcagagctctagctaaagctattttttgtttttgacctccagacaaattactaccattttcaccacattgataatttagtatatctatcttttctaattcttcatatagatttaccttttttaacacctcaattatctgatcatctgaaaaatattcattttgaaataaagttacgttctcacgaatagtagtgtcaaaaatatatggtgtctgatcaactgttggtattgaatctgaactctttttcccatgtgataacaaatttacataacctttttgtggctttaaagaaccattaattaaatttaaaatcgttgttttcccactaccagaagttcctgttaataataccctaaatggtgacttaaatgagaagtcaatacttaatttattttctggtgtaatagaatatacaacatctttcatgtgtatctcatctattgatgaagtatacagtccgttattatcatgttcagcgtctataaaattcttctctccacttaagtattttaaaaacggtttccttaaatctttggttgtatttatcttatttaatgaataggcaattgattgtatcggccctaaaactttatcgtttgctaagaaaatacctatcagttcactaaaagaaaggcttttatgataaattacaaaataacatcctacaaccaagggaactagaaagcaaaaacctgaaattagtactgcaaccaattttgaaagaacctctgatcgtttcaaattaaaagtagaatcttctagtttatccaactttttatccgacaaactaattatttctttagtaacagaataagattttaatgtcttaaaaccattaaaaatttcttttattatgtgagtatactctgcattgctgttagagtactcattagctgaattagacaacatcttcttcataaagacaggtactataatcggcaatgctgataatacaataaatattattgaaactaggaagtttaaataaagcataaaacttagagagacgatgaacaacaatattgaagaaattatttcaaaaatttgtctaaaatagttttcttcgattaatctcaaatcatttgacaaaactgaaataatagatgagtaatctttaaccatttcagaagaaagatactgttctctaaaatatccttgtttaatttttacatttatatctttagttattgatgcttccgttacttctaaatagtaatttgatatatagattgctgaccaacccagaatacttatagcaccaaatcttagaacgtcagaaaatgaggaagtctgatttaaactacctgcatatacaataattcctgagagcaagacaccattaaacgaagatagaaatattaaaatccccattaatataagtttagtcttttttataaattttaaataattcataagttattccttcccacttcttcaaagaaataatttaaagtatcaatcattaagagaacatctgatggagtaaaacctccatgaccagctgctttgtttaaatacaacaaacttttaactccaatagaatttaatttctttgaccactctatcacttcgttattattaatatatgggtctttctcacccaaaatattaactataacagtatttgagtctcgtgccttttcaatattttgcataggcgaatatgactttatataagcctttacttcagggtctctaatatctccccactctgctatttcggtcttagaaagaggatcatttggattctgaagtgtatcataaggatttataaatggcgaaaataagagaatgctttgcaataaatttttttcctcgttcaacaccgcaccagcaattattccacctgcactagaagttattaaacctaatcgcttactgtcaattacatcattttcccttaaataatttactccctcaataaaatctctgatagaattccatttgtttaacgcctttcctgagcgataccattcaccacccaaatagcctccacctcttacatgaactatagcataaataaaacctgcatctattatagataacataatttcatctaaatcagaattatcattcttaccataagccccatagacacttagaatacatttttttcttcttgggagctcatccgtatcttcacttttccaaaataaagaaatcggtatgcttacatcataactgtcttttttagtccaaatcaccttagaaaaatatttagtattattcgattttatgatgggtctttcaaattcagtttttaatgtattttctattaaatcaaaactaagtattttttcgtaaaaagttctcctctctaaaaacagaagaacacgatcagaaaatgaattttcataaagtgttgtcttttcatcaaatgttatcttattaacactcaactccctcaaactattatttttaaatgtagcaagataaaagacggaattcgctgcgtttgaacagtctaaaaggatataacgtcctatacagtgaactcttctagccctatcttgatatggtatagtaatagaaactctgtctcccgaagaagtttcccttagaattagttgatctttcttttcttcagttgaagagagcccaagaaagtactgtgctttttctgtactaaatagagcgatatctctaggtgttggggctaccgtttctgtgtaagagtgtctaacaaaacccgtccggtcgaaactgtatagaaaaatcctgcctttctgaaagtctactgactttacaaaacaattattgctatcaatgtggactatttttaatcgaaaagagcattcgttttcttcaaacagttcctcttctgtaaagctatcaaaagatttatagaataacttacttggcctcccgtactctttggagcgagtatacataacaccgaatttacccaaatagaacgaactttctactgaaatatcttcaatgataaataactcttccatagtatatttttttattccaattaaattagtcgtacgcagtgaggatacaaccaaaactatataactctcatcagatgaaatcctaacatcctgtaagatactatcatctggcaaagtatatttttccacatcaaagacaattttaagtgaatttgaattgtctaaactggaagaactaaccttaggaatccagtcattatcttcgacataccattcctttattacaccagtattgggtatactccaattatcaaattggtaccaatatcgccctctcctaaatatcaaagaattccatttttttaattcctgaaatgatgaagagatagacctcttatagtgtgttttttcctgtattgtatttaaaaatatttcattactctgattcacaagtatgaccccttaataatggtatctaaatattatatttgaggaagaatcgtcaatttattatccattattgataccaatccaattgcaacacccgcaaatcccgaagcaatatctgttgttatctttaaaccattatctcccgcaataacaaatccttcttcaattacacacaaatatctataaagttgttcaattaatttcttttgtcctgaaaagttatcatcgatatcactatatatattattagcaacttcaagaccacaaaatccgttaaataaacctggtaatacacaaaaaactacatcagttgccctctctaaagaagttaaatattttaagtatttgcttgacaagatttctttatttctattaataagtaaaagcaggccagcacttccagttgctagatatggtagtaatctatgaccttggctgtactgcaatgaattattactatctactttataagcaactaattctttatctacagccaattctagaccatttttatagatactttcaccagttaatttataagcttcaccgaagagccaagctacccctgcgtgaccatatagtaatccaccaaaattctcataaggatcgttactctgaacatcactagcgccaactttacaaaaagtttctggattttctatataatttaaagtatattctctaagcctaattagtatttcttctcctagtttattatcaattccccctttactaagaaaatacagtccaaccagtaaaattccagcctgcccactatataaatttttattttgtgaattctcaaatatctctataaaatgagttgtaaaaagttcaactgcccgatctatctccccaaattcataaatgagccagattgtaccaattttaccatcaaaaagaccagaaagggacgatttcttaaaattatttactgcctcattaataacctgtgttcgaatctcataatagtcatcaaacttgaaattttttactttcttagctagttgttgataactccaaaggatagctaaatctgaaaacgcaattccttgattaaaattcagaccataataatgaactgggaagaatcttgattgaaattctttacgccactgtccataagttagcgtaaaccctctcaataattttataataaaatcttgtatatcttgctcactctcgatagttctaatctcatgcatgggttttaaaacttttttcctggaaatattctcaatctgtggacatttagaatctagatatgacaataaactttctacataatctatatgttctcttgtataacccaaagactcaaatagtttttttccttctatcctggtttgacttacatagttgtatgtcaaatccgatgtagttactagtggcatgtataaataatgagctatttgtctaataccataccaatctatctcactgggaagtgtttctcgccatgctctaaaaccaggggctgcaactttatgtacaactttttcatcatttgaaaagacagcctgttcccagtctattatactaatctcatcttcatccttaaccaagatatttcctaaatgtaaatcttgatgatatacattttcagaatgaaacttattcgttaaatcgatgagtttttctactatctttgaaactctcaatagataatctttggtcttatcaacaacttcatataaaggaaaattattggtaacccatctatttagtggaacgcccttcatatgttcaattcctaagaaggtgtgctcccagatcttaccgtgccagtatattttaggcgtctcactccattcatttagaatttttagtgctttgcactccgaagctaatttctctgaagaataagtaccatcaaatcctagacctgtatacggtctagcctcttttaaaattatttttttcccatcttcttttagcctagcattatatatcccaccactgtttgaaaatctaattgcattatctataataaagggaaagtctccctgttttttatctttcttgtcaagccatttattcaaaaagtcagggggcactataccttttggaattttaaatactggtaaacgttcatctttaacaacttcatcgccaacaattaattcatcaatagcaaccttcttttcatcatcccttgacggcctaaacacaccatacctcagatatattggtgcttcatcccaacgtttatcgcttaaaatatatggcccattatattgctttaaggcactttctaacctttgcaaaaccgactctaattcattttgatttggataacatgtaataaatttaccagaaaatcctcgactaaccaatttcccgtttcgcatgataaatttgtcttctgtactaagatgtttaaatggaattcgcatttcatggcaaatttttgctacatcttgtaacaattcatgtgaactgttatactctgaactaatgtgtattttccacccttgtctttcaacaaattttccaatagggtattgataaacccactcatcattattcattacttcgtgccaattaaaaggcagacttacttggtactttatgctagtatctgtactataatcattattagtgaaaaagaaaggatgctccaaattgaaattataatccataacaaaatctccaagaaattttatcaaacttaatatatctatagctagacagacttatttaaataaaaagggagaatcctttggattctccccatataagcactaacattccaacgtgcacatattggaacgacatccataactccagagaatctctaaagtttacaatttaaatgaattaacaattttcccaactaaaagcactccagttaccgcaacgatttgtactgaatgtactaaatcgcattccatcaacttcatctgtttcgtcaacttgaacagatactaattgaagatttaatacttcttctgccatagctagctcctcctatttaaatttttgggattaagtactttatccaccctcattatactctctccaccagtaaaatgcaagcaattatacaatgttgtcacatagaaaataatgtttccgtaacttttcaaagtaacttccatctctctcccaaaactggaagttagttttagaagttacctaaaaatcaggtcacctattttaaaaaagcagcaaactataaactagtaggttccacaccaaatgtagtcccatactgccccataagtcagatttatagcgcaccatacctaaaaacatcccaagtgaaacatacaaacaccaagctagaatggttcctgtatgatgtgctaaggcaaataaaacacttgtcaaagcaactctgatatctaattttctgaccaaattccataaaatttctcgatacagaaattcttcaaccatactcgcattgattaagaacaataaaaatgaaaaccaaggaatttgatgttgaaggccaattaagtttgcttgattcgtgcttccttgagcatgaatcagactaaaacatagacttataatcagtaggctaacaaattcaacaccaagccatttcatcctagatttcatattgaccttatgcgcttgtttgcgttggccatacatccataaaaaagaaatgagtgacgaaccatagagaatctgtagtatagttaactcaccgatacaaagaaatttcaataagtatagagataccaataggacatttacttgttggaatatataaactggaattattcttttcatagttacctccgaaataaatcttcataatctaaatctaatacctgcacaatcctttctacccatggactttgaggcattcattgttccatcttctagtggcgaatcttttgatacaaacgattcaattcacttggatagtgaaactctcccgcaaacatttttctggttaactcaatccagctgatatttctttcagccaaaataatggacaagttctcccaaaatcgttcagccatattgcttctcctttagttagataaataatgtgtttgcgccatgtaaatcaattgtttcgtatctcttggcaatagagctctagcctcttccaaattcagacttggataaactcgcttatttgaaaccgcaagaggaagtctgatggttagttcaggattttttaaaattatctcaacgaaatccgttaatcttagattgtcacggttcttaaatcgtaataaattgggagataaaaactcaaaacaatctgaagaatagctcatcatctcaattaatttgtcctttgtcatttcagaaactgaatgacaagatacctctatgccatagttttggaagaaatctaaaagaagttgatttctttgtctatttttacttagatagagatcaatcatgggagacctcccaaagattcggttccatttgatattctgacacgattaaggaatctaataaattaaggaatctaataaatttgcgaagttaatcggtttcttgtcttcatcataagcttttacagttacttgggttgtaagtattccctcttttccctcggctcgatagccttgtccatataaaacaaaaacgagattttgatgatcatctacaaaggcatcaaccccattctttatgtcttgactttcaaggaattccataacgttttgaagataggattcgtaaaatagtgggtagttatgttttttatggtaatcatctaaaaatgtcacttcaaactcacatggagagtaattttgactttgaacagcctaaaagtgccatcaaatttgaattggaataaatcaaataaatagccccatcctcatcaatccaacctttgctcaaagacaactccaaccgatcttttaaaactgagtaaaccaccttaacctccagtttcatattcttataccgttcactctcaaataaaagtttggggagcttataataacgctctgatgtctgatattgattagcggtaatacgcttcattattgtccctccaagactaaaattccaacatttccaaattcatcaaatcggattaaacctacttgttccatttcatcaactaactgagttgcttttacccaaatcattcatacctctctcaactagatgtaacttacaaaacccctgacctcatgagccactttcttcctcctcatgaggtcagttttactttctgctgttccagtatcgtttttcctcgctagatttcctcaaaagggcagactcctcccttggtgcgtcacacgattttttcatctcgactgttctttaatgcatcattaacgacgcttttcttctaggtggttcataaggaacaggaagattcaggttgacttttctaatcctagaataaagtgctgaaaacaattcggaataggcatagagactagacaatttgaggagctgcttgcgtcctgttcgaacacattttcccaccacgtgaagaaaaagatggcggaagcgtttgattgttaaagtttggaagtcacctccagctagatgtttgagaaaaagatagagattgtaggcgatacagctcatcatcatacgaacttcgtttttgattaaggttgaactatccgttttatcgccaaaaaatccctccttcatctccttgatgaaattctcggcttgaccacgtccacgataaagctgaaactggtcttggcttgttccactcgtcatatttgtaacgagagaaataacatcgtagaacaagtttccttcttttcgttcagagaactggcagacacgacgcttgtgcgaccaagatcctgcttgatagagagtttctgagtaggcggagtggggcaagatggttaagtcctcatcctgtgggcaagggagggaaaggtctccaagacggctcagaacagtatttttcttgagttttatgaggtagtattgccctgttttttcaattaaatcgtataattttggggtcgcaaagccactatccattcgaaagagaagttgattaaaccgttctaaaacaggtgtgataaagctgtctgcctcttcagaacaataacgattaccaggacgaagctgggcattgaaacaataacctgtcttcccctcgaaagcataaagaggatgatagccatgagcacgatagtgggcgttataagcaacaccttcttgcttgccataagttgtgaaatgggtagaatcgatatctacaatgagttggtttagctggtgaaactgtaaaaagaattcgaccaattcaaggttgaggcatcgcaaactatggactgtttcctcgtcagttctggaaagaaaacgggataaggttggctgtgaagcaagctgccctccttccaacaattttggaaagtaggcatcagctgacaattctttacaagcatagtccgttccataacctgttaacagttgaaagaggaactggacaaggatatctgaatccgaataacgacagtagcggcgttggtcattcgttactaaatacttagaaatccgctcttttagtttcaactgggaaaaaagttcctgaaaaaagataagaccaccatactgggttaaatgacctccatcgaaagatagttggtaaaaagacttgttttggaagtgatgatttggtaaactgttcatgtgagtttcctttctttttgtgtttttttctacacttataccataaaggggaaactcttttttgtctagtaaaaaacacccattgggtgaaaaaagaaaccatccaggatctaagctaaggcaaggattctggatggtttttagatttggggtgaataattggggttttacaatatcaactcccatgatagtcatgagatgactcttcacgaattgacgtgatgactgtccttccttttgcataattacctccgaaacacaaaaaaaggggtagacaatctagtgtctacccccgaaagtttattaaaacaaaaatcctgccaaagaatttttggcaggaaaccaaatcaatttatcagtttctatcaatcgcttatcgctctcaaagactggtaaatagggattccgcaatcaaattgcgatactctattatttaagagtaactgaagctccagcttcttccaatttagctttgatttcttcagcttctgcagttgcaacgccttctttaacaagtgctggtgcaccgtcaacaagttctttagcttctttaagaccaagaccagtgatttcacgtacaactttgataacgccaacttttttgtcgcctgcagatgtcaattcaacgtcgaatgaatctttagcagcaccagcatcagctgcatcagctgcagcaacagctacaggagcagctgcagttacaccaaattcttcttcgatagcttttacaaggtcgttcaattcaaggattgaagcttctttaatttcagcaataatgttttcaatgttcaatgccattgttatttcctccaaataagttttaaattttataatagtttttttcgtagctaggctacgctgtgtagcttaagattaagccgcgtcttctttgctttctgcaaccgctttgactgcaagagcaacgttgcgcactggcgcttgaagtacagaaaggagcatagaaagaagtccttcgcggtttggaagagttgcaagtgcaagaatctcttctttagatgcgacagcgccttcgattgcaccacctttaatttcaagtgcttcagcgtttttagaaaagtcgttcaagattttcgctggtgcgataacatcttcattagaaaatgctactgcagatggtccaacaaatacagatgcaagatcttcaagaccagctttttcagctgcacgacgcaagattgagtttttaataactttatactcaacttcgcttccacgaagctcacgacgaagaactgtatcttgctcaactgtcaaaccacgagcgtctacaacgacgatagatgcagcagctttcattttttcagctactacgtcaactagttccgcttttttagcaataattgcttcactcattagtgtgttcacctccgtaattattttgcttggggaatttttcaaaaagaaaaacgcgcccaaacctagacacgaaagtacaatacgcttctttttacatgatacgttttgtcctcggtaggatatttatgagtcgagctcccctactgtcttaggcagtttttttaaaccgtatataagtatagcatagtcaaaaaaagaatgcaagatttttgcaaacttttttaaaatttttcgtaatttttcttttaaagttctactgtcaggacttgaccttgcttaacaacctgttctccggcgatataaacatcatctacatcactagatttaactgcataaaccaggtgagacagcatattttcctgaggttggagatgaattttcccttgtggttgaatgaccagaaaatctgcttgcttgccgacttccagacttcctatctgattttccattccaaggaccttagccccttcgattgtcagtaccttgagagctgtttcgattggaaactggctggcatccccacttttcatcttctgaagaagagctgcagtccttccttcctcaaacatatctagattgttattggaagcaaccgagtcagtcgcaattccgactgctactcccgctttttggagctggataattggagcaattcctgatgccagtttgaggttactgataggattgtgggcgatagcacttgagaagatgccaagcgttcaatttctctctcgtttaattcgaccccgtgagcaaatacggacggatgatctaaataacccagttcttcaagaaaagcaagggggcgtttgccgtatcgtttgaggataattcctgactcctccttggtctccgccacatggacatggagcggaatatttagctcttttgccatttccaaactcgcttccagcaagtctctactgcagctatacggagaatgaggtgctaccataaccttgaaatttggatttttatattttaagatttcgtctatgatggatcgagttctacttatagtctcagcagttgtttctgtctctgaagaaaagagagtcggagaaaaataacaacgcatcttggaagttttcaccacctgataaatttgctggatatccacaccattgggattatacatatcgttaaaggttgttgttcctgactggagcatctctgtcagggcttctttgaccgcattggtagtcatgtcgggagtaaactcagattctgctggccaaatatagtcattgagccattcatggagattgctgtcatctcggatccctctcagacctgtcattgcagaatgggtgtgacaattgaccaaaccaggcataatccaagctccctgatagtctataatctgctcagcttgctctaaaaacgctggcttatcttgaccgacatagacgatttgagaatccttgactgctaagattccatcaagataaacatggaaatcttgatcacaagtcacgatatttacatgctgaaagactttcattataggctccttttctaaaagacaagttgtactctcttcaaaccacttcagattcactttgccgtaggtgtggttactgacttcgtcagttctatctgcaacctcaaaacagtgttttgagctgacttcgtcagttctatctgcaacctcaaaacagtgttttgagctgacttcgtcagttctatctgcaacctcaaaacagtgttttgaactgacttcgtcagtcttatctacaacctcaaagctgtgctttgagcaacctacggctagcttcctagtttgctctttgattttcattgagtattacagtgaacaatttttctagctattgtaacaaaaaagtcactcgaaggcaacttttttcgtccataaactttcaaaagagaatggcttattcagaactaaaagccgcagctttttgcatttggtaatacttaccctttctatccatgagttcttgatggttaccatattcaacaatatcaccatctactaagacaagaattaaatccgcatcctgaatggttgacaaacggtgagcaatgatgaaacttgtgcggcccttcatgagttttgcaaaggcatcctgtaccagcacttctgtccgtgtatcaatggaagaagttgcctcgtctaagataagaatctttggaatagccagaaagactcgggctatggtcaagagctgagcttggccgacagagagagattctccagcattttccaacttggtatcgtatccctgtggcaactgttggatgaaaaagtctgcattagctgctttggcagcagcaattacttgctctcgactggcttcaggattgccaaaggcaatattatcatgaatggtcccttgtgtgagccaggtttcttgaagcaccataccaaactgctgtctcaatgatactcgtgtataatcataaatggattgcccatccagcaagatatctcccgagctaatgggataaaaacgcataaggagattgataagagttgattttccagcacctgtcggaccaacgatggctaccttactaccagctggaatatcgatagacaagtccttaatcaaaattttttcaggatggtagccaaaagagacatgtttaaaggaaatagctcccttaacttggtcactggtcgtcaagacttccttacctgtttcagccacttcagggctatctaagactccatagatacgctctacgcaagccagagcactttgcaactcagctagcactgaagaaatatcgttaaagggcttggtgtattgctgaacatagttcaaaaaagtcactaaacgaccgacggtcaaggctgaacccatcatgatacgataagctcctactccagctaaaagggcataaatgagtgcatttacaaagcgagtcgaaggattgaccgttgaagaataaaagatggctgactgagaatagcctgagtagttgtcatgagcctcacgcaatctttggataaattctgtttgagcattgaaggactggattatagtctgctgactaagcgattcttcaatcaactgagtctgaattcccctcgtctctgtttgcttctggaagagatgataggatttcttggcaataaagcgtgaaatcaccatggacagtggcgtcaacagcaagactaagagagtcatgaggagatgaatttggagcatggctagaatactgaccaaaatcatcaaaacaccaatgaaaaattggttaaaaatcatggtcaagccagctgccaactgttcgatgtccgtggttacacgactaaccatctctccactaccttgcctatctacaaaggcaatcggtaaacgatggagcttatggatgattcgctcccgtaaatctctggtataagagaagattagacgattatagaggagaggattggcccattgtaccagagtatttcctattaccaccaagagcatctggagaaaaatctgccaaaaaactggtgatgaaccagccactaggacttggtcaatgacctgcccaatcagaataggtaggtaaattgataagccaacttgggcaatagttcctagaaaggctaggaaaaggaggaaaggatggcttgctaaatctacggctaaacgtttgagcgtctggtttacagtttgtcgtttcattctagtcctcctttccatgttgggatgcattgatttcacaatagacttggctggatttcatcaagtcatcgtgcttgccaacagctagcaactcacctttttccaagaggagaatctggtccgccatctgtaaagttgaggttcgttgagagatcaaaattaagctcgtgtttggaaaattttctctaatagctttcaagagcttggactctgtaatggtatccagtgccgaggttgcatcatctaggatgagaaacggagcctggcgcaagactgctcgggcgatagacaatctttgtttttgtccacctgagaaatttcgcccccctgcctcaactagagcatccaagagtccttccttttcactgacaaaatccttagcttgcgcaatctccaaggcctgccagagttcctggtcagatacttcttgattgaaacctagagtcaagttggaacgaatggttcctttaaagagttcgaccttttgaggtacataggcaatccaagaccgccactgctccaaattaagaggactacgtccattttgataaaggtcaatgttccccttgtctactggataaagtccaagtaagagttgcaccaagcttgatttaccagaaccagttcccccgatgatacctagaatttgtccttgagtcatatcaaaggaaatgtatctcagagaaggctgggccgcatcaggataggtaaaggtcaattcttggacttgtaaaaccttatctctggtagcttgcttttgttctaactctgaatggatatcctctggagcctcaacaaagacttcctcgattcgcttgactgagatataggactggttgagggaattgatcaacatggctagcttgaccaattccaccaaaatctgtaagaggtaattgataagagcaatgagagcaccttgactgagcactcctccttgaattgaaatatagccttgccagataataacgagaagagttccattgacaatcagataggtcagaggtgttaataaactagaccagaaacctgtcttttcttgtaatctagcataaacttggttaagggtttgaaaaatctgtaactctcgtttttcttgaccaaaagcacgaataacccgcatcccttgcaattgctggcgcgtttcctgaaccagttggtccgttttctttctgagactactgtagaaaggattgaccaatcgagataaccctacaatgacaatggtcaaaatggcaaccaagactaagaaccagaaagtcaactcagctgagattcgataagccataaaaatggcaccaaaaacgataatgggcgctcgtaaaaagagacgcaggaattgattgataccagtctgaatctggtaggtatccgaagtcaagcgagtgaccaaactagaagttgtcagacggtctctgctgtccttgggcaaggaaagaatatgacgataaagatcgtttgtcaattccttagcagaacctactgctgcctttgctgagtaaaattgagctatcaaggccactaaaacgccaattactgcaaagataaggagcaggccaatctgcatccagagatgaccttgatctccctgaggtaaagattggtcaacaatcccagcaatcaccatgggaaccaagagctcaaaaacagcttctaacagcttgaacaagggggctaaaattgattccttgatgtagggtttgaagtaagataataggtgtttcataaatcccttctattcatattctagaaatgaagaaagtgggaagccccactctctgttttatttgtttaagtaaggcaatagatagccatatcctgctttttccatctcatccttggccacaaagcgtaaagaagcagaattgatacagtaacggaggccgcctaactcccgcggtccatctgtgaaaacatgacccaagtgagcactgcctgaacgagaacgaacttcaattcgctccattccatggctcagatccttgtaataatgaatcaactctttggaaatcggacggctaaaacttggccaaccacaacctgaagcaaacttatccttggcaaaaaagagtggctcacctgtcgtaatatctacataaatcccctcttcaaaggtttggtcataggcattggtaaatggagcctctgtagcagcttcttgtgtgacacgataagactcttcagatagactggccttcaacacctcttgactaggcttttcatagtttgctgcatcaatcaatggcttatcagcatcggtcacatcgatatgacagtaacctgaaggattcttcctgagatagtcttggtggtagtcttcagccagaatgtagtggcgtaattgctccacttctactgcaatctttcgacccagcatgcgttcctgctcctgcaccactgtgtagatagctggcaaatctgcttcatcctgataataaatcccagttcgatattggcgaccacggtcattcccttgttgattgatagatagaggatcgataactcggaaataataaagtaaaatctctctgagtgacacttccttctcatcgtaaatcacttggaccgtttctgcatggtctgtttccttgagcaactggtaattggtcgtttcgacttgaccattagcgtagccaacactggtttctagcactccagaaatgcgtgaaaaatattcctctaggccccaaaaacaaccacctgctagataaatttctgccatctttatttctcctttatcacgtttttaactaatactcttcgaaaatctcttcaaaccacgtcagcgtcaccttaccgtagtatggttactgacttcgtcagttctatctgcaacctcaaaacagtgtcttgagctgacttcgtcagttctatctgcaacctcaaaacactgttttgagcagcctgcggctagcttcctagtttgctctttgattttcattgagtataaacttcttttcacaaaaaggatatgaacccctctggtcaagagtttccccatcctatcttctattctttattttgcttctacacggacaccttgggtatcaactctcaagtcatgcagttttcctttgaaaggttgcttttccaattctgccttaattgttggcatcttgtcatgagaagccagaaccataactgtcggcccagcaccagaaaggtaggttgcataggccccattttctttggtcacttgcttaatcatcgcaaattctcttaccaagtcctgacgatagcgctcatggaagaggtctccctcgattgcttgcccagcggtcaccatgtctcctgccaacaaggcagcaaccgctacattggcgatagaacttgcagcaacagcttccttataagacaattttttaggcaagacactacggctgtcgcgagtacgtaattcatagtttggaatgtaagctagaaaatcacactctggaaagtctgctacgatagcagagacttgcccttcaacagaacttgcaataacgagattaccataaatggctggagccacattgtcaggatgcccttcaatcttggtcgctaactgcaatttttcatggtctgataagttgagttgacccagttggttggctagttcaatcccagcaacgataaccgagctggaagaacccaaaccgcgcgccaaagggacatcactggtcattttcaagcgtcttggttgcaagtctggtacaatttgcaaagcgattttgagcaagagattacgctcgtcatgtggaatccatttgccaatctggtgttcaatcagccactcatctcgttcttcgcagacctcaatttgaagatacttggttacagctacaccgaccgagtcaaaacctggcccgatattggcactggttgcaggtacaataatcttcatcttattctcctagcaccttgaaggtattcaagaggtcgaattctgaaaccttcttcaattcagctgagacattttcaagctgggctttattaatcttgtgtgtgatgataacgacacgcgccttgtcaccctctttgccatcttgaaggatttgcttaaaggaaatatcttgagcattgaagatttcagccaacttcaagacctgaccttttgagtctagagccaagattgagaaatagtagtttgctttgacatcttcaggatttgccaagaccaagtcacggctatattcgttgaagtctttgccaatagtaccatcattcaaacgacgaacgatacggacaatatcagctacaacacttgttgcagttggtttttgacccgcacctggtccgtagtacatagactcaccaataccgatagattctacaaagacagcgttcattacgccattcacactagcaagtgggtgcgctttaggtaggaaggttggagtcacttctgcagcaatacctgaagaagtttcctcaatagaaccaaccaatttcactacgtaaccaagctcttgagctacagctacgtcttctggtgtgatattgcggattcccttgtgggctacatcatcaaaggcaatcttcatgccaaaggcaaattggctcaaaataaccatcttgtaggctgcatcaatcccatctacgtcattcgtcggatcgctttctgcaaatcctagacgttgtgcttccgcaagagcatcatcgtaagaccagccttcttccaccatcttggtcaccatgaagttggaagttccgttgactactccaagcacgcgcgtaattttatcagaagccaaggaatttgctaaagtacgaagaattggaatcccaccagcaactgctgcttcgtagtaaagtgctaccttgttagcttgagcgatttctagcaattctgcgccatggacagctaaaaggtccttgttagcagtaacaacgtgttttccagcttccaaggcacgagtgataaaggttttagcaggctcaatacgccccatcaattccactacgatagtaatatcctggtctgataaaatatcatccacattggttacaaagttaaagtcattccctgctgcaagcaagcgatttttttcatcttcatccttgaccaataccttagcaactttgatatctgaatgtgctgattgattgatttttcctccattttcctttaggaggaaaggcacaccacttgcaacggtaccaaatcctagtaaagcaattttaactgtcatctttatctcctcgaaattttctaatatagccattataacagaattttgtgaaaattcctattatagtaaatcactatttcagtataaaaagaaaaaacgaatcagacgattcgctcttcttaaaatctgaaaatagctttccagaaaggattagccgattttttgcagattgagcactgcatcgtgactcatcaagacttgaccatactcttgtaagactgagcgactgatatcactatcgtctgcaaactcgcgcatacgggccaacagccaagctggatatgggcttggatgattttcaatatccactaaaatggtcaaataatagcgctcgttcattttgtagagttcagaagtttccatttcaaaagtcactgtcttggcaaaagctaccaagtcagccaacttagcaaaagaaaggatgtagtagatgtaaggttctttcttactctcagcttcttgttcagcctgctcttgctcttcttccttgacttcaacttgctcaagagattgaatggcttcgatatcatccttggttttgtctgcgatgcttttttccagggttttgataaattcatctggagacatttgagccaattcttccatatctggcaaatccgataagtcttcaaaatctagattttggtcaatctttgacttggtcacaaagacatctaccttatcaggttttggagtcacacggaagctcaacatgcctgtatccagaaagctatcaggcatctctagctcatccaagatagcataaaagaactcttctgttttttcttgaggaacgagaaagtcagcaatctccattccacgatccatcaaatcctctaaagatatcgtgatttttaaagttgtatcactaatttgtttcattttcattgctagtaacctcatactttcagttctatctattatactagatttttacgattttatcaaaagaaggctcctctatacggatagattttccctagggtctttctataggagactccaaaagaaaatttctgcagacagatagaaaaagccttcaaaatcggctaagagccgactttgaagaccttatacatcagaatacttataatttaaaggttgctacaccgaggatagaacgatttaagtttctgagaatttgaagactttgctcaaatttcttataacgagtcactccgtactcttcaacaagaaggactgtatctctttccaaaagagatgatacatcctgtaaatctacaaaatgcattccttttaaagcttcttgactctgtttcaatttatctaagatagctttatttgagctaacgatggtcaattcctgtccagtatttttgtatgacaaaacatctgctaggttagcaattgttgtaatctctgttacaaaatcaatttgatactgagaaaaatcacctactctattgattgttggattaaagagataaactaacacatttcccatcacaaccaaaatcacacaaaccactccaataacaactaaacgaagaatcagatttttcacatttaagccaagcgctgtttcaccatttgcgttcaattctttagagttgatggtttccagtttttcaattttcacatttgcataggcatgtttaaatttctcaatcaacccatcaatttttttctctaacaagttattggcatctttacttgatgtcaaaattttcacaccaacccctgcatcgtcaatcatatagtagacggtcaattttttccaccaatagtcattcgttgaatttttcaaggttgtttctgtcgtgtctaattcactggcaatttttttcaactcactgggttctacatcattgaaaagataagctccattcaaattaccatcaatcaatttcccataaaaatcactataaccaccaatttgatgattcaaaatcgttttgtccgactcttttggaggagtgattttatagataagataagttgaataacttgttgtatctttgacagtgtttttattcctaactgctttaattgtaaatggtacagcaatgagagcaaataaagcgatgagagctaaaatatttgcttttcgctttttataaagatttgcaaacaaatcagctactgaataatgttcaaacatgatttttttctcctttgtttagtagatactagttttcctttgtaagcatttttgctacaaatataatcacaagaacaattccccagaattgcattgtaaataaattgaagaaactttctgaaaagctgcttcttggcataaagaatagattattcaagatgagtagggataaagcaaataggattgtccttgagcgataggctacttgcagcatggctataaataatacgccgagtaagaaactaagcagaaagactccaatcataccatagtcggtatacaactccatgatataactacttccgataccatgccctttcaagtattccttgttcaagacaagataggatagattgtgggcataactattactatcaatagctagttccacactattggttgtatgttcaaaggcttttcctccgaaaatggctcccaaactcccccttgcaaaataatcaagaacaggaccaaaagtaaaattacggaaatctcggtaagggaggctactgttaaatagaaaacctcgagccagaacaccaaaactagtcccttgtttatagataaagtcaagtaagatatcccagaaacctgtatgggaaacttggacattatcccgtacataattgagtactcccatcgctaacatgagaataggagaacctacaaaaatcgctaacttttctttaaacccaatccattttcctttttcagtttgctcccgcataaagtaataaacaaaagcaaataaaatacttaaaataaagggatttcgtgtcccaattgccaaatgaatagtattagctgcaataaaggagacaagcactgctgtggcctgcaatttctttggcttggttgccagatacatacacattgcatagaccgtaaaggtagacaaaatgtaggtaaaataaggcagtttactttcaaaatttgcatagtaggcatagtaggaagtctgcaaacgatacaagagccgttcaaataaccgaatgaaatagaaaggataagttagaagaaaaactcctagtgatacaaagcgtaaccgcttgatataaacctcttttagagaatttcctatatttgctacttttattttcttcctagctatgaagtaacgagccagaatgcctcctgtggtcaagcccagaatcgaaatcatgacaactataaaggcaaaacgataggctattggatgataggtatccaaagcaccatccctaaaataatcaatggtcggtcttgataccagaaatacaaaaatggttaaatagaaaataaaatggattaagtaatacttgatatcattccaacaagcaattaagctactaaccaacaagaacaataaagtagaaagtaagctaacattattattattaaacagatacacaattccacttactagcgtcaaggcataactgactatggtcaaactaaataataatcgtttcccatcaatcacttggtcacccccgttctaatgtaattttttagatttttcaatatttttcagtaataagaatcgatataaggaaatatttatgaatagggccaaagcactaattcttctccccttacggaaaattggattcctagaaatagcaaaggcatggccttttaaaaaacgatgaatctgagaataggcttcaaactgtttatactgatcatctagcaacatcttatccagaataaagaagtgggcataggccaatctgaaaaaagcgacctctttcaagtcaggatagtttttcacaacttcattataaaacttttggtagatatcaatataggctaaatccttctctgcatagggtttggtcgtaatactatcccctctatggaaatagtaataatagggtttagtattaaccacatacttcttggccaacttgattaaatcaaaatggtaataggcatcttcgtaaatcaaccccttaggaaaggatagggcagttgcaatctgtctcttgattagcttattgcaaatcgtcccaggtattttttcacctatgaggtattcctttagaaatgtttgagaatcacagacaaaatagtcatcctgattggctgactgtgggctttcatcattagcatagacattcatgacaccacagctcgaaacatccgcatcttcttgaactaattgctcatataagctctgaatcatttctggatggatataatcatctgagtcaataaaaatcagataatccccgtgagcctgcttcatcccatcatttcgtgcttgcgacaatccttcgttctttttatgaagcactgacaccctgtcatcttgttcagcgattgaatcacacaagcgaccactttcatctgttgcaccatcatcaacaagaataatttccagattttgataggtctgcttctgaatggaagctatcgatttttctaggtactgcgccacattatagactggcacaatcacactaattaatgcagtttccatgctactcctctaatagtttttctacttgttcgatttgttttgtaattgtaaattgttgaatgaattggctagcctcatcgacatcaaagtttgaggcagaagtcatgtaattagtaatcgcctgagctgcctcttgattgctctcaatgatttgtccaaatcgtccttcttgggataattcctcagcccctccaacgtccgtagagataaaagggagtcccagactcaaggcctccacatacactccaggaaaaccttcttgtttagacatagacaaaagaactttcgtctgagatagatactgataaggatttttttgataaccaaggaaatgtacatagtcctcaatcccatactctttgactcgttttttcagttcctcttccatatcaccagccccgataaaatagagatgatagttttttccctcttggtgtaataatcgtatcacttccactacacggtcagaacccttattttcctcaatccgtccgatagtacagatactttgaggagcaatctcgatatcgatcttctcttgagatttttctagaatagtctgaaaatcatatccattgtagattgtctgtaatttagaagtataatctggataaacttccttgatagaattgctggtcttttttgaaatccctacaattgtattcgcagcatccaactggcttctatgtgattctcttttagagctatccttaagaagttcttcaatacttccatgaatccaagatatcttcttgacttctcttcttttagagaacaacagtggtggattcataatggtaaaagaaacttcaacatcataatcatcttttacaagcaaacgacgagtcagtcttggaaaataaattctcattctccacaaaaaagctcgtaaccatctggtttggcgataatcttgaagggattttaaaatgcgtacatgctttggaacagattcatatcccttgtcaaagtgctccatttcaagaatatcaatatcatacttttctggatccagatttgaaacaatggttgatagaatcttctctgcaccacctccaagagaaaaagaccacataaaaaataagatttttttcttagccaccatattctcccttgtattctgtataagacttatccatatcagcgatgacagcatcatgatgcggtacctgcttgtctgctggtggaggcgtcatataatccccaaaagcagttctgagatagacatcatagccgattggaataggcatctctgttccttcaaatggcaagaaaagattgtcttcaaaagatgtgattgggtacttgtttctcatgtagccaggacctgagcataattctgtaatgccatcacaatcagccaaatcatacttagtcatttctttctcagcttttttccagatgcgataacggagagattttggagtcaaacccagtaaaatgcgacttccccatttcatgagatcaccatgcttttctggaatagtttgcgcacaaaagagtgaataaatcaaggcccaacgaacctgttttttccgctcagctggatttttcggataataatccaaaggcaaaacatccaaggccagaccatgtggcaaatccaaatcctgctgataaggcttgatacaggtggttttcttgtcacgaatggtaataaaaagattacgatcaacaaaatccttgtgactctttgacaagaaataacgttcatctgcataacgaggccataattctgctaatttctcataatctttacgaggcataaaaaagtctaggtcgtcgtcccaaggaataaatcccttgtttcgaagggcaccaatagcgcctccgccacagagataacagagcaaatcatgttctttacaaaaggccacaaaatattcagccatctccagactacgagcctgaattgcttttaaatcagtcatattgttcattattctttctatcgtatcgtttcattataccacaaacaaggggtgaaaatctattgcagactgtaaaaaatcaaagcctgactgctatccaaatagctatcaaactttgatttttctgtcttatactcttcgaaaatctcttcaaaccacgtcagcttcaccttgccgtaggtataggtaactgacttcgtcagtcttatctacaacctcaaaactgtgtttttagcagcctgcggctagcttcctagtttgcactttgattttcattgagtattatcttatcttaagcccatttgagcgagcttggtttgatatttgttttgatcaaccagcaggcccaagcccccataaacatcataggcatctacccagtcacccagttctggaatcgtcaatttttcaataccattttttgctccatccaaaacagataaaccgtttgttaggaggaaagtatagggtacgttggttgaggtcatagcaaaaacctttccaagagcttcagaaccagtgaaaagtttagtgggatctttaatttgctctaaaattgctgttaaaacttgttgctgtctttttgtacggccgtaatctgcctcatcatcatcacggaaacgagcataattgagcagggtcgagccattcatctgctgttttccgactttaatggtttgggttggagactcagtctcggtagcgtataaatcatctccgactgtagcttctgttaggggacgcccattcaatgttgaaaattgagcatcaatcgtcaccccatcagggaaaagcgtgtcaatcgctgtggcaaaggcctggaaatcaaccaaggcgtagtacttaatgtccaagtcaaaattatctttcaagacttggcgaaccatttctgcccctttttgcccctcttgttctcctaactcgtaggctacgtttaacttgttatctgtctgttttctaccattaatcacttgactataaccatctatatagaccaaattatcacgcatgaaactgactagcttcattttcttatctgagcccccgacatttaataccataatagagtcagttcgtgtctcaacactgttctggccgattcgaccatcagtacccatgattaaaatattaactccatctctagtgtcctgaccattaaagacttctacttgagctgcccgggcatcagcagttttctttgcgctagcatcttggtaaccacgcaaaaacatgaataccatggccaaagccacacagaccaaaagtgaaaaaatcaccataaaaattcgtttaagacggagcttccgtcttttcttttttggagggaaagagagtgcttgtgatttggattgtgagcgactccggttcgcatagcttggtaagtcaacctgctcttctctttcttgttccaagctagagctactatttcccctagcaagagttagcttttcttgcaaataggcaaactcatttttttctctctcattgagatagtgaatattttttagcaaataatcataacgcaactgctcatgatgacttaagggattttctttactcatcttctctcctttccatggtctgatattggataaataggataggcacccagaattttatactggattccaatcgcttctaattctttttgggcaaagtggaccaagtccttatcggtataatccacatcgataatgaaaaagtattcacccagtgctgtcttgagtggacaactttcaatttttgtcaagtcaattcctcgccaagcaaaggtcgacagggccttataaagtgcacctggaaggttgtcaggtaatgtcaaggccaaactcatcttttcagtttgtgcttgcaagggaatactaggcttttcagctcctagaacccagaaacgtgtgaaattggcttccatttcctgaatatcctcggcaatcagttccaatccatattcttcagcagaacttctaggtgcaactgctgcaaagggctggtctggatgttcggaaataaaacgggccgcataagctgtactagctgttacctcgatttgagcctctggatattgttcatcgatgaatttctttccttgagccaaggcctgtggatgtgaaaaaatcttttcaatcttagtatggcctggaaccaccatcaactgctgatgaataggctgaacgatttctgctactgcttggatgtgagcctgatgaaaaagatagtccaaggtttcatgaacactaccctcaatagaattttcaactggcaccacagaatagttcactaatccttgctcataagccttgatgacatctgtaatgttggcaaaagcctgcaattcctcatgaggaaaagctgtctgcacaacgtggtgtgaaaatgatcccttgggacctagataagcaattttcatcttagttcctctataatttcctctgggcttagcttggtcacatccaaaacccgactagccacttcctcataccaagcctgtctttcttggaaaatagctactagttcttccttgctattatttagaaaaagcggtcgctgattgtccttatcagctgcgatacgttggtagagggtttcaaaatctgctctcaggtagatgttatctgtattagtcttgagtaagtcacgatttctctgagaaataaccactcctcctccagttgacacgacttggtctgtttgtagtaaatcagctaggacttctgattctacctgacgaaaggctgtttctcccttttcagcgaaaaaattcgcaatggacatacctaggcgattctcaatcagagcatccatatcaaggtaattagggtccaagcctcttgcaatagtcgattttccagcccccataaaccctaataacaccttagccatgaatcaagctctccaaatcatcaaagaaactaggatagctggtattgatggcttctgcacggtcaagctccacctctccatctgcaaccaagagggctgcgatagctgtcatcatgccgatacggtggtcaccaaacgtattgactctagcaccgtgaagagctgattttcctttgataatcatcccatctgccgtaggagtaatatctgctcccatactatttaaggcgtctgccacaacctgaatacggtctgtttccttgaccttgagctcctcagcatccttgataactgttacaccttgggcttgggtcgcaagcagggcaataatgggcaattcatcaatcaatcgtggaatcaaagcgccaccaatctctgttcctttcaagtcagaagactcaacaatcaaggtagcagatttagcgactggatcgatttcagttatttccaattttccacccatggcacgaatgacatcaataataccggtgcgagtttcgttgatccccacattctgcagcactagacgagaatttggagcaatcaaacctgcgactaaccaaaaggctgcactggaaatatctcctggtacgaccaccttctgtcctgtcaatttttgtggcccctggactgtgattttcttaccatccacacttaaatgaccaccaaattgtttcaacatatcttcagtatgattacgggtgtactctttttcgataataactgactcccccttagcttgtaaggctgcaaacatcaaggctgacttgacttgggcagaggcaattggcaactcataatgaataggtcttaggtttttcgtcccttttaagcgaaggggaggcaagtctcgttcagtttgccctgaaatgctgacgcccatttttttcagtggaagggtcacacggtccataggacgtttggaaagactatcatctccaaacatctctacttcgaaatctgcaccagcaaggacacctgaaatcaggcgaatcgaggtgccagaatttcccatattaagggcattttgtggcgcttttaagccagccatgcctacaccttgaatggtaataaccccatctttatcctcaatttcaacaccaaggtcacgaaaaacctgcatggtcgaaagaacgtcttcacctcgcagaatatcataaaccttggtctcaccctcagccaaacttccaaagataatggaacggtggctgatagacttgtcacctgggacgcggatactaccatgtaaatggcgaatgtttgtttttagtttcatactggacctcatacttgcaatacttttacctattttatcataaaaagccagaaattccttaaaaattcctgactttaggatcgttcttttcttatttcagcaattctgaaactggttcaaaaacaattttttcaatatcagaaaggtaaatggccaattgttgttgcttggtaaagaattctgacaagaggctatttccttgaatctgtttaccaaagccttccatcttagcttggaaggacgcatctggcatttgacctgtctgtgctagtttttgaatttcctcttgaaaggcaagataatctgtaaagattttgcttgcctcagcatctgctgcaatcgcatctttagctgctttaacagccttgtattctggtaatccgcgtagaccgcgactgagttcgtttgcactatcgtaaatatttgacatgttcttctccttatttgatgacgactgtatagtcagtattttctgttatgagatgctcagctctttccaagtcttgagcatttttaaatgaaatttgtaggattccgtgaatatcctcacgattttcctcgttgatgtggatattaaccaaggaagttccacgtagcagttccaaaatccgcaggatgacatcttcttcatcaggaacgtcaacatagaggtcgtaagagctatccacaccaccacgcttatggatttccatggtctggcgttgttcacgcgcttggttaaaaaagttccaaatttgctcttcatctcccttactaatggcctgaccaatcgcttccaaacgttccttgaaatcctcaattctatccagaatgatctcgctattggacaagagaatggaggtccacattcctggctcgctttccgcaattcgggtcatatctcgaaaaccacctgccgcaaagcgccttgccatctcatgctcttgagcatagaccgcagtctgctccatgagactagaagccaaaatatgaggaaaatggctaatctgagaagtgacacgatcatgctccttggcatcaatctcgataaaacgagcatgaagacctgaaagcagatccttcatttccttaagcgtgtcctgacttgtcaggcttgaaggtgtaaagatataataggcattttcaaaaagattgacatctgccgaagcagcccctgtcttgtgactaccagccatgggatgggccccgacaaagcgaacagacttgccagccaaatactgctccgccgcatccacaatggttgacttggtcgaaccagcatctgaaataataacgccttctcgcaaatccaaattggccaactccttaatgaaagcaatagtttgtttgattggcaagctgaggataatgacatctgccaaaggagcaaaactagcaaaatcatccgttgcacggtcaatcataccttctttcaaggcgatatctctcgaagcttgactacgattataacctaaaatttcataatctggatgatcgcgtttgataccaagtgccatagaggctccaatcaacccaagacctgcgatatagattgtttttgccataggaactccttaatagttctttgtatagtctcggtgtttggctaccgcttcttttagttcctcaagattatctgatgagaatttttcgaggatttcttgcgccagaaccgttgctacaactgcttccatgaccattcctgcagctggaagagcagtcggatcacttctctccacggttgccttgtaaggttcgtgggtttcgatatccacactcataagaggtttataaagagtaggaatgggtttcatgaccccacgaacaacgatgggttgcccattagtcataccaccttcaaaaccacctagattattggtacggcgagtataaccgtcttctttagaccagagaatttcatccataacttggctgcctttacgataaccagcctcaaagccaagaccaaattccacccctttaaaggcattgatagagacaacagcttgagccaatcttgcatccaattttctatcccattggacataggaaccaagaccaactggaacgcctccgacgactgtctccacaaccccaccgatggtatcaccatcacgtttgatttggtcaatatagtccttgatttcctgttctcgttcttggttgacaatagaaacttcagactgggcagctctttgcttaatttcagcgactgtcagattttcaggaacatcgatttccttgccaccaaagaccacgacatggttggcaatctccatatccagctcagccaagaggcgtttggctactgcaccaactgccacccgcatggtggtttcacgagctgatgaacgctccaaagaatttcgcaaatcatcaaaacggtacttaatccccccaaccaaatcggcatgacctgggcgaggatgagtaattttccgcttgcttttaaggcggtcttcaatgtcctccgcagacatgatgtccagccatttctggtggtccttattgatgacatccatagtaataggcgcccctgtcgtcttcccgtggcgaacgcccgaagtaaagacaacctggtcattctcaatcttcatacgaccaccacgaccgtagccaccctgacggcgtctaaggtcctcattgatatcctcagctgtcaatggaagtccagctggaattccctcaataatagctgttagacgggggccgtgtgattctcctgcagttaaatatctcatacactctccttattttaccaagtagtctttcatctcttccagagaaactgggtgaatggtcgctgaaccaagctctggcaccaagaccaatttcaaggtgttaccacgcgctttcttgtcatgagtaagagcctgataaagcttgccaacttcccaattttcatagtcaacaggcaaaccgaatttctgacacatctctgtgatagattgggtaatgccagctggcatgaggcctttttcctcagcaaccttggaaatctgtaccattcccatggcaacagcctctccatgcatgaccttgccataaccggcagtcgcttcgatggcatggccaatagtgtggccaaaattgaggtaaagacgaataccattgtccaactcatcttcaaccaccatcttgcgcttcacctgacaagaatgttcaatcaaggtctctgcatgttccaaaatactctcaacagaaccattcagtcccgtcaagagagcccacagttctggatcctcaatcaagccatacttgataacttcacccatcccttcaatcaactctctttttccgagggtttcaagaacaagtggatcaatcagaaccccatctggttgggcaaaggtccccaccatatttttagcaaatggtgtattaacgcctgtctttccaccgatagaagaatcaacctgagctgtcaaactagtcggaatctgaacaaagtgaataccccgcatataggtagaggctacaaatccagccaggtccccaacaacgccaccaccaagagcaacgattccatcgctacgagtcagaccttgcttgactagaaattcatagactttctgaacagtagttaaattctttctttcttcaccttctaagaaatcaaaaacagctacctgaaaaccagcatcttctaggctgagcttgaccttctctgcatagagagaggctacatggttatctgtcacaatgactaccttttgcggttgccagagttctcgcaaccactgaccagcctgggccatacaacctttttcaatctgaatatcataaggatggtgaggaatatcgattctgattttcataggagagtctccctttctttattggtatttttctgttaaagactgccaaatctcttctgtcggcatttccttgcctgtccacagttgaaaagcttctgcagcttgatagagtaacattcccagaccattgactgctggattgccctgacttctagcccatttcaaaaacggtgtttcaaagggttggtatatgatatctgcaactaaaagagtttctggtaagactatgttttcaggaacaggagaggattggccatccatgcccacactggtggcattaactagcaaatccgactcggcaatccttgcttgcagttcagaaacatattctaaagcacacaaatccactttaaaacctgtctgctcctgtaacttgtctaggtaaggtcttgttttttccatagaaacggaacgaacaaagaccgaaatctgactgacgccatccaaaatagcctgtgccaagattgatttagccgcaccacctgcacccagcagggtcatctttttacctgaaattgtaaaagaaggcaagcacttaaaaaatcccttgccatctgtattatatccaattaaattgccattctcattgacaaccgtattaaccgcaccaatcaagcgcgcttcatcgctcagcttatccaaataaggaatcacctgctccttatagggcatggacagattgatgccaaacatctggtagcgacgaatattggccactgtttctaccaagtcactcgcttcaatctcccaagccacataagcaccgttggtagctgtcgcctcaaaggctctattgtggatgaagggagaaatagaatgcttaataggattggcaacaactgcagctaaacgtgtatagccatcaagcttcatccaaaatctccctgatttttttcatgctagctagagaaatctgcccaggggcactaacctcatccagactggcaaaagaccaactcgaaccagtcacatccgcagtgatacgagagaccttgcccaccttacccatagaaatggtcacatattcctgttcaggattgagggttttaaagcctcgtgtatagttcatcaagtctaagacatcctgctccgtgtgagccatcaccgcaaccttaacaagttttggatttaggatcgtcaactctgacaagatttccatcatgttctcaggtgtttcttggaaattatggtaactcaaaacaagatttgggaagtccagcatttcctcaaaaacatccttgtagctatagtactcaaaatcaatatagtctggttgatagagttgcgcaacttccttgattagatggatatactcttctggagaaaggtcgatttctccaccttcggagcgagttcgtagcgtgaaaaccaactcacggcctgcgaatttttcaaaaatggctggagctacctgcaaaatcgcttctttaggcagatagtcggcacgccattcaatgatgtcggcatccaggtacctcgtggcatccagagcctgagcctcctctaaacttcttggcattactgaaacgattaatttcatttactaaccttcatactaatcaccttgaggtaattactactttcatcttttttattataggcaaaatctgctggaagaccatatttgtttaaaatctggtaacttcttcctgcaaaacctttatcaatttgttctgtaaatttctgacgggaaacattggcagcattggtactggcaatgataatccctcccggatttaaaatctcaagactctgggaaatcaacttgtgataatccttggccacagagaaagtttgttttttattccgagcaaagctaggcggatctaggacaatcacatcgtaggtcaagtctttgcgtttggcatatttgaaatactcaaagacatccatgactataaaacgatgctcgtctgtgctgagcccatttgcctgaaaatgcgcttgagacaattctcgtgaacgtttggctagatcaacagaagttgtatggctagctcctcccatggccgcagctactgaaaaagccgctgtgtaggaaaacatattgagtaaggatttacccatagccaagccgtcaactaaactaccgcgaacctcatgctggtctaggaaaattcctgtcatcaagccatcattcataaagacttgatacaggacaccattttctaaaacattgaaaaagtcaggtgcttcttgaccataaacatgggcagattcatagtccaaacccttaaagcggattttctcataagctcctaaaacctcagggaaaacctgtctaaaggcttctgatatagtctgacgaatctgataaacataagagttataccaagaaaagacggcgtagtcgccataaaggtccactgtcagacccccaaagccatctccctcttgattaaagagacgaaaggcagttgtcaaatcatcttgatagtaggcgtttctcttttctttggcttttctaaacaacgtttcaaagaaagcttgattgaaggccaccttgtctttgctgataaaccagcccaagcccttgttttgctgagaaaggtaggcagtcccaagaaagtttccttcctgaccctgcacctctacttcctgatccttaagattgacattctcaagatcactggcttctagtaaaactagccccttagcaagcttcttttcaacccttttgctgactcttattctattcataactaccattatatcaaacttttagacaattctcaaaaaagaaactacccttgcttttttactcttcttttaaaaaatggtatactagacttcctgcaaaactaggaagtaaatgtgtaagaatcacagtaaaaaatgctcttccgtcttggaggagcatttctttttatcaacgaaaatcaaatagcaaactatgaaactagcctcaggttaactgtgagattataggtagagaggttgtatcagcaatatgtgtctgtcaaatttagtgacaaaggtagtagaagaaagataaagaaataaatcagcttcagtaggtatctggaaaatttgattttatagagaagccttttgttacaaactcaatatactatcaataaataatattatagaagcaacaataattataatttcacctatctgcatcattctatttcgaactctaaatatatgttctatcaaaaatacttggaacacacacattataggaattaacgtttttgaaattgaaaaatatccaaataaataaactataaacaacaaaaatagaactatgttatatttcttattcaaaacattcctccctatatatttttgattaccaatcttaatcatttacaactacattctaacaaactataaaagcgtttgtcgaattgaatttatcaagcaagcgaccaaccagttcatcttttttctatttctgccaatatgcgtgacaggtaataatgatagccaaaaatagcaagagcaagcaagacgataagagctcctactcccaagctgatggcaaggataggggagagagactgaaccaagaatatgctcccaattacaagggccatcaggattgcactataaataaacaataaaactatggcgactatgccatttgaacgattcaccaggtccgtaatgctactccaattggttgacagatttttaacgtccttaaagtaatggtggcaagaaaggatgacactggcaatgatccagactacaagaaggtaaatcatcgaaatgatgggcaagcctagatatagagaaagaccaagcaaagtcagaactggtaaaaaggactggacagcatatataatccaaaatttcactttcacataacgagcaaagtcaaagggtaaactcttaagaaaatcaacattttccctctccaaggacaaggcaattgaatgcaggctggtgatattgttattgacaactgctataaagagagctataaaaaacaagggtaaccagtatggaggatgaatgtctggaactatctgagaatctcggattttggaaatcagaccgatcatcatgagataaggaaggaaagcacttgtaaaaagcactgtaatcacgccagtcccctgtcccaagagggtgaggtggtagcgtaaaaccatgcgaaaaaatccctttttagtggttgaaattctctccttgctgcgacgttcttttttgaccttctcctcactattaagcaggatcacgtcataaaaacgaggaaggaccttctttttggtcagataaagcaggaagagagttagtcctatccaagcgagcagacccactaaggcttctgtcgaaaaaggctccactgctattttgtaaaagatatgaagaggataaaggagaaatggaatgtctctaactttgtcaacaatacttccaaaagtcgactgaagaaagaagataaatattaaaggtatgagaactcctatcccaatcatcacattcgaaaaaatagactgatactttctgaagaccctagtttgagccaagaaatgcactgccactaccatcactagagccacagagacaaataataaggtcaaggacagtagcatcaaaggcaaacccagccatagagaaggagctagcctaatgtagaggaccagaaaataagctaggattggtacaattccagttagagctggcaaaaggacagacagtcctttagcaattataatctctgattctttaaaggcatagggcctatacgataccaaatccttactctcataaaagacattgtaaaaggccgttaaagaagttgaaaaggcaatcactagtaaaatagcaatcatcgagctaaaataaataggtatttcctcaaaaggaaaatgaatggctatattactaaaacagatgatcatcaagagactggaaaaaatgtaagaacttaagactctagcggaaacatttacttttttcccaggattcttagcctgcttctttcgtagattagccagattagcttcttgagatgaataaaggatattgatatcaactaattttttaatgaccttgagacgcatccgcaacctcctcttttctaccagcaagactaaggtagatactttccaaagactggtctgggtaatcttttctcaagtcctctacactaccacaataaatcaaatgcccctttttcaaaatggcaatccgatcacagacttgctctgccacctctaggacatgagttgaaaacaagactgtcttccctttttgtgcatgttccttcatcatctgtttcaaatcaaaggcagcctggggatccaaaccagtcaagggttcatccaagacccaaatatcgggatcagacaagagtgctccgatgacaaagactttctgacgcattccgtgagaaagagtttcaataacctgatagcgattttcagcaaaatcaaaaacgttcaatagcctagctagactagcctccaagtcagatctactcagatcataggatgaggcgatcaattcccaaaattcattggccgttaagcgtaaaaataagtcaggcgagtctgctacgtagccaatctttcgtttaatagccaagcgattttccgataactcctgaccgtctaccaaaatacgaccactgctgggtgaaatgatactgactagggattttatagtggtcgattttccagccccattatgaccaatcaagcccataatctctccattttcaatctgcaaattgagattactcaaggcctctttatcaccatacaacttactaacattttgaaattcaatcatgggacaactcctatctttatctgtattatatatcgctatactagcactttgatacaaaaaaatcaatactttattttaagtagttaaaatagtttccttctatcttacgcaaacgtttgcgctaatagatactttatgatagaataaagaacaagattgacaagtaagaggaaacattatgcaaaatcaaacactcatgcaatactttgaatggtatctgccccacgacggtcaacactggacgcgtctggctgaaaatgctccacacctagctcatctggggatcagtcacgtctggatgccaccagccttcaaggcaaccaacgaaaaagatgtcggctatggggtctatgacttatttgacttaggagagttcaaccaaaaagggactgtccgcaccaagtatggtttcaaagaagactatcttcaagccattcaagcccttaaagcacagggaattcaacctatggccgatgtagttctcaaccacaaggctgctgccgatcacagggaagcctttcaggttatcgaagttgatcctgtagaccgtacagttgaacttggagaacccttcaccatcaatggctggactagttttaccttcgatggtcgccaagatacctataatggcttccactggcattggtaccacttcaccggtacagactacgatgccaaacgcagtaaatctgggatttatctgatccaaggggacaacaagggctgggccaacgaggaattggtcgataacgaaaacggaaactacgactacctcatgtatgccgacctagactttaaacatcctgaagtcatccaaaacatctatgactgggctgattggttcatggaaacgactggtgtagctggtttccgtttggatgccgttaagcatattgactctttctttatgcgcaacttcatccgcgatatgaaggaaaaatacggtgacgatttctatgtttttggtgaattttggaacccagacaaggaagccaatctggactatctcgaaaaaacggaagaacactttgaccttgtcgatgttcgtctccaccagaatctctttgaagccagtcaagctggcgcaaactatgaccttcgtggcattttcacagatagcctggttgaactcaagcctgacaaggctgtgacttttgtcgacaaccacgatacccaacgaggacaagcccttgagtctaccgttgaagaatggttcaagccagcagcctatgccctcattttgttacgccaagacggccttccatgtgtcttttacggagactactatgggatttcagggcagtatgctcaagaagatttcaaagaaatccttgaccgcctcctagccatccgaaaagatttggcctatggagaacaaaatgactactttgaccatgctaactgtatcggttgggtacgttcaggtgctgaaaatcaatccccaatcgcagtccttatctcaaatgaccaagaaaacagcaagtcaatgtttgtcggtcaagaatggactaatcaaacctttgtagatttacttggtaaccaccaaggtcaagttacaattgatgaggaaggttatggacaattccctgtctcagctagatccgtaagtgtctgggcagtcaataccatctaatagctcataataaccaagctaggtccaagcggatttggcttttttgtattcacaaaaagacctacccaaatggatagatctttacttgattacaatttacctgctactgcatccaacaattcttggatcttaggttggttgcttcctcctgccatggccatatctggtttaccaccaccacgtccatcgatgattggtgctaattctttgacaaggtttcctgcatgaaggtcttttgtcttgcttgctacaaggacattgactttgtcaccgatagcggcaactaggacaagaagatcagagtagtctttttgtttccagttatctgcaaaagtacgaagggcaccggcatcggatacagacacttgactagcaatgtaacgatgaccgttgacttccttaacatctttgaagatatcgcctgcggctgcagctgcggctttttctttcaactcagcattttctttttgaagttgacgaagttgttcttgaagtccttctaccttgtgaggtacttccttgacttgaggtgctttcaaggttgctgcgatagctttaagagcatcctcttgttcacgataggcttcaaaggcttccttaccagtcactgccaagatacggcgagttcctgaaccgattccttcttctttgacaattttgaagagaccaatctcagaagtgttgtcaacatgagtaccaccacaaagttcaatagagtagtcaccgatagtcacgacacgaacttccttgccgtatttctcaccaaagagggccatagctcccatttctttagcagtgtcaatatccgtttcaactgtcttcacttcaagtgcttcccaaattttctcgttaacttgctgttcaatcgcacgaagttcctcagcagttactgcttggaagtgggtaaagtcaaagcgaaggaattcaacttcgttaagagatcctgcctgtgttgcgtggtttccaaggatattgtgaagggcagcgtgaagcaaatgagtcgcagtgtggtttttcatgacacggtgacggcgattgctatcaattgccaaggtatattcttggttcaaggcaagcggtgcaaggacttcaactgtatgaagggcttgaccatttggggctttctgaacattggtcacagtagccacaaccttacctgactcatccaagatttgtccgtagtcagctacctgtccacccatttcagcataaaatgacgtttccgcaaagataagagaggcagttccttctgaaacagctcctacttctgcattgtcagcaacgatagctaccaatttagaagacaattggctagcattgtagttgaagacactttctacagtgatgttttgaagagtttcattttgcatacccattgagccacccttgacagctgacgcacgcgcgcgttcttgctgttctttcatggctgcttcaaaaccttcacggtctacagtcataccagcttcttcagcgatttcttcagtcaattcaactgggaacccataagtatcatagagtttgaagacatctgaaccagcgataacagattgacctttttctttcaagtctgctacaatgccttgggcaaagtgttgacctgagtgaagggtacgggcaaatgattcttcttcgctcttaacgattttctcaataaagtcacgtttctcaagcacttctgggtagtagctttccatgatttttccaacagttggaaccaatttgtaaaggaaaggctcgttgatacccaatttttgaccatgcatagaagcacgacggagaagacgacgaagaacataaccacgaccttcatttcctggaagggcaccatcaccgatagcaaatgaaagagaacgaatgtggtctgcgataaccttgaagctcatgttgtcgccatcttggtcataaaccttaccagacaatttctcgacttcacggataatcggcatgaagaggtccgtttcaaagttggtcttagccccttggataacggccaccaaacgctccaaaccagcgcccgtatcaatgttcttatgtggcaattccttgtattcgctacgaggaacagcagggtctgcgttaaattgtgacaaaacgatgttccagatttcaatataacggtcgttttcaatatcttctgcaagcaggcgaagaccgatattttctgggtcaaaggcttccccacggtcaaagaagatttctgtatctggtccagaaggtcccgcaccgatttcccagaagttgtcctcaattggaatcaagtgacttggatccactcccacttcaatccagcggttgtaagaatctttatcgtctggatagtaggtcatgtaaagtttttcagcagggaaatcaaaccattcagggcttgtcaaaagctcataagcccaagtgatagcttcgtcacggaagtaatccccgatagagaagttccccagcatttcaaacatggtatggtgacgcgcggtcttccctacgttttcgatgtcgttggtacggatagccttttgggcattggtaatacgtggattttcagggataatggtcccgtcaaagtatttcttaagggttgctaccccagagttgatccacaaaagagttgggtcatttacaggaaccaaacttactgatggttctactgagtgacctttggtcgcccagaaatcaagccacatttggcgtacttgtgcactagatagttgtttcatattgtctccttattcacttgtttaatgtgattggctttccagcatttccacatagtcaatcgcgacacagagggaaatgactaggtctgcataagcgtcttcaagaaccgttacggtataggtagaagtcagatggaagagttccttcttaatttccgcaatcaactgatcgcgatcatccagcaatttgaaattcaaatcccagatattgccctcgatacgaagacctagattatcaaactcatacttatctcgccagaaggtcaacttcttacgaatgacaaaactcgagccatcccgaagctgaatttcaaaacgaggaagcaaggtcaagatttctttactaatctcactgacttgttcaccagccgcatcatagatggtaaaggttttaggaatcttaaaaaatgatccctccacctgataggcaatttctcccctgtcatccttgatagcgaagcgttcgcctccaagacgaaacttttgtttgacaagaaatgttttcatcaacacctccaaaaatcaaaagacaagctcatatcacgaagggcgaaaaaccgcggtaccaccttcattcaatgaacttgtcattctcttgttcttatgcaattgtatgattgagtagcatgacttcctagcttagatggctcgcagcaccgccatttctctggactaagacaagtgaaaatcaattctcaactttcttattataacgtttttttaagcttgcgtcaactggaaatgatctccgttgaattagaccaattccctacatctctgattactttttcaggatatattttttcttactgccatttttctttttatcccaaattttcatattactaaacacagctactagaatatttccaaatataaaggtgcctatcacccaatatatggactcagttgttaggtattgtcgatccaagccatcctttaaatggaatagtatagcagtttggttaacaatcataaaggttggccagaaactttttttgaaaaaagtagacattttcattatttgttgccgctttctgtaaggttaatactcaataaaaatcaaaaagcaaactaggaagctagcctcaagctgtacttgagtacggcaaggcaacgctgacgtggtttgaagagtataggcttagtatactactaggcaagcaaataaacaaataaacaactagaatagaaaaagatagggctctaaaaactgacttctattccttaaaaacgaaccagcttgactgattcgtcttcttacgtttatctcctacttccgatacattttaaactgtaggaagaggtcgctatatttccctgtccatttatggtcaaatttctcataaacttctaggtgtttcatggtttcaacatcgggatagaaggccttatcttcctttgtttcctctgggagcaattccttcgctggtaggtttggtgttgaatagccgacatactccgcattttggagagcattttcaggtttcaacataaagttgataaaggcataggctgagttttggtttttaactgttttgggaatgaccatattgtcaaaccaaagattgctggcctctgtcggtaccacataacgtagattttcatttttttctaacatttggctggcttcaccagagaaggtcacgccgattgcaacattattctgaatcatatagcccttcatctcgtccgcaacgatagccttgatatttggagtcagtttgtagagcttatccactgtctcttccaactgctgcagatccttggagttgaggctgtagccgagggaattgagtcctagtcccagcacctcacgcgccccatcaaagagcatgatagaattcttatactccggcttccaaaggtcatcccaatgctcaggcgcttcatctaccatggtttcgttgtagacaattcctaaggttccccagaagtaagggatggagaatttattacctgggtcaaaggactggttgagaaactctggtccgatattttcgattccttcaatttttgaataatcaagcggaaccaagaggtcttcgtccttcatcttgttaatcatgtattcacttggaatggcaatatcgtaggtcgttccaccctgctttatcttagtgtacatggcttcgttggagtcaaaagtctcgtactgaacttgaattcctgtttcttctgtaaactgagtcaagagttcaggatcgatatagtctccccagttatagataaccaatttttgactatctcgactattgattttactatctaaatgagtcgcaattccccacaagacaaggataatcgctgcaattcctgctaaaaatgaatagatttttttcatgcttgctcctccttctcacgagagataaagtaataacctacaactaggataatactaaagagaaagactagagcagacagggcattgatttctaaggaaatccccttgcgagcacgagagtaaatctcgactgatagggttgaaaagccatttcctgttacaaagaaggtcacggcaaagtcatctaacgaataggtgaaggccatgaaataaccagtaatgatagacggagtcaggtaaggaagcatgatttccttgaacatctgaaattgactagctcccaagtcataggccgcatgaatcatgtcgccattcatttccttgagtcgaggcaagaccatcaagaccacgataggaatggagaaggccacgtgactagatagaacggtcaaaaagccaagtgaaaacttgagttgggtaaagagaatcaagaagctagcaccaatcataacgtcaggcgcaaccatgaggatattattgagtgatagaaaggcttcttggtatttcttacgagactggtagatgtaaatggcaccaaaagtcccgataatggtcgctatcaaggctgataggaaggccaagaaaaatgtctgagccaaaatcagcatgagtctcccatctccaaacatggtttcaaagtgagtccagctaaaacctgtaaagctattcatatcatcaccagcattaaaggcatagccaatcaagtaaaagataggcaggtagaggaccagaaagaccagtcccagataaaggttggcaaattttttcatcgttctctcctttccttagtcacccacatggtgatgaacatggtcaggatgagaatcacaccgatggttgaacccataccatagttgtcattggttagaaaattctgctcaatagccgtccccaaggtgataacgcggttcccaccaatcaaacgggtcagcatgaagagactcaaacttgggataaagaccgactgaaccccacttcgcacaccgttcatagatagagggaagatgacatgacggaaggtctcccacttagttgcaccaaggtcataactagcattgatgagattattatccatatcgtctaagacattgaaaatcggcaaaatcataaaggggagctcgatgtagcttgcgacaaagataaaggaaaaatcggtaaaaagcaactgttgtgaaccaattccgataaattccaagaattggttaatagagccattttgaccaaaaatcccgataaaagcataggctttaaggagcaaattgatccaggtaggaaggataatcagcatgagccagagttgacggtgtttgagacgggtcaaaaagagggccgtcggataactgataagcagtgccacaaaggtcacaatgcctgcataaagcactgagttgaaactcattttaagataggtcaagttttgtgacgcaaagtaagatttgtaattttctaaactgaactggccttcgatgttgaaaaaggattgaccgaaaatcaagaccaagggtgccaatacaaagagcgcaatccaaagcatgtagggtactacaaagagtttagagcttgttttcttcatctctttcctcctcgattgcattgatcaaacctgcttcttgctcttcgatttctacgtactcctcaatacgagcatcgaactcttcttcggtttcattgagacgcatgatgtggatgtcttctggttcaaagtccagaccgatttcctcacccacgatagccttacgggttgagtggatcatccattcatttccaagttcgtcataggcgataatttcataatgaactccacggaaaagctgggtatcgaccttaacttggagcttgccttcttcaggaagggtaatgcgcaagtcctctggacgaataacgacctcaacaggttcatttggcttcatcccaccatcaaccgcttcaaagcgtttgccgttaaattcgaccaagtagtcctcaatcatggtacctggcaagatgtttgactccccgataaaggtggcaacaaagtggttgattggctcatcgtagatgtccacaggggttccagactggacaatctcgccatcattcataacgaaaatccagtcactcatggcaagagcttcttcctgatcgtgagtgacaaagacaaaggtaatgcccaatcgttgttgtaattcacgcaattcgtactgcatgtctgttctcaatttcaagtccagcgctgataaaggctcgtccaacaagaccacacggggttggttgatgatagcacgggcgatggccacacgctgacgttgtcctccagaaagtttgcggatggaacgtttttcataaccttccaactgaaccatcttgagaacttccgctacacgctgctcgatttctttcttatcaattttacgcaagcgaagtggaaaggcaacattttcaaacacattcatatgtgggaacaaggcataggattggaagacggtatgtacgtcgcgcttgttggttggaatatcattgatacgaacaccgtctagcatgatatctcctgtcgtcgcatccagtaaacctgcaataatgtttaggatagttgatttccccgaaccagatgcacctagaagggtgtagaatttcccttcttccaactcaaagttgatgtctttgagaaccttggtgttgctgtcttcaaaaactttagagacgtttttgaattcgataattggctttttcaattggcataaattccttctttttcatagattaaccgatcggggctctgtcaggtccccactacctcttgcagggagtaaaaccacctgcatacatcttcgctaccgataggctttcacccaagatccggacttctctttcaagcgtaatacctgagtgttccttgactttttcgataaccgattggatcaagtcctcgtagtctttggccgttccatctgcgacattgatcataaatcctgcatgcttttctgacacttctacgccaccgatacgatagcctttcaagccagcttctgaaattaactgacctgcaaaatgcccgactggacgcttaaagaccgagccacaagatgggtattccaaaggttgcttgagttcacgtaggtgcgtcaagcggtccatttcctgcttgataacctgatgggttcctggagctagggcaaatttaactgacaagacaactgcaccagactcctgaatagctgaatgacggtaaccaaaagccaagtctttagcagacagggtttcgatttctccatccttggtcaagaccttacaagactgcaagatgtgagcaatctcgccaccataggcacccgcattcataaagacagcaccgccaacgcttcctggaataccacaagcaaactcaaagccagttaaactatgacggagggcaatgcgagttgtttcaatcaagttagccccagcttctgcttcaatggtatagccatcaacagaaacgttattgagcttgtcacacaagatgacaaatccacgaatcccaccatcacgaacgatgatattgcttgcattgccaagaaccatccaagggatattttcttggttggcaaatttcacaacgcgagccaactcaaaacgatttcgtggaaagaccaaataatcagcctctccacctacttttgtataactatagctatgcaagggttccttaaaacggatatcaattccttctaagatttcaagcattttttctcttacagacatgtcactcttccttttacaaaattcattccattataccatttttagagacatttgacgaccataaaaataccttgtttggattttgcataagaaaaagaggttcccccctttttatgattttttacaaaagatttccttggttccataggcgaccagaacgagctccagtgctagaatcacttcaaccaagactggatttgtcaaccagcctacttggaaaagagatggtgccagatcaaagaaggcatgcaagccataggctgctaggagataaatccatttcttctggcgaacagcttggtaaacccaaactgtcaaaagtaattggaaaccaagcgccaagattcgctcaaaaccaagcaaataaatctgccagaccgaaagtgactgaatggtttttaacatattttcagacagtaattgcataacctgtggattctgagtttgaactgccgaaagaacaatgtaaagattgagtaaactagtaaggcctagaaaaatcaactccaagccaccatgccccagtccataggccaaggcgtctgccttttccaaacttctctttttctccaaccatttgaagaaaacaagacgagccgtttcctcaaaaaatgctgccatggctaggccatagataatatagataagcggatgatcttgcaagagggcaatactaccgtctttttgagggtgcaaaatcaagatatgcaccagtttttccaaaatctgcgaagagacaaagaaagcgactgcacccaagcccaagacagctagattaatctggtatttctttttggcaaaccaaatgcttcctatcagaaaagctagcaacagcaacatggtaataatgatatgaatggtcattttcttctcctattctgccttttcaatatcttttttcatctcgtcaacattgaacttagcaaacaagtattgacggtcttggactgggaaacgttggtccaactggtcaactgctcccacctcgataatgccttccttgatgacaaaatccatgacatgtccaccgaaggtcaaatcatctgatatgaagtgcagatggtagcctgccacactgaccccatggaaaatctcaggcgtccagaaaccaacaatagtccccgcaacattgtcacgactatattccggttgatgggttgcgacatcagcaaacttggtatcgggtgttgacttaggaatcatacgcacatgcatatgtaaaaattccccccgaatcttgatagagcggaaaagattttccccatcataataagactcaattcgttctttcaattccttgtctgtcatctcaaagcgctggcggaaaatgacctctgcccgatgcggtaccactgcagcgtaaggaataagggcatctggtgacacttccacaatttctggctggtctcctgaccctttggcctgataagccttgccatccaagacaatcaattccccatcaatggaatccaaggttcccaaaccaaggtcaccatgttctagcaattctcctactgtcatagtaccaccataaaggccagccatcaaggctccaagagtattgtattgaaataatttcactggttcctgcacgttcttatccattcactttcttgtctgttattctataaatcttactcctaagtataccacatttgcccctagatgtgaacgagagaaacgctctagacattgccaagaaggaaaaaaaagggtacaatgtaacaaaatcaagggaggtctggaatgaagaaacaaagcaagtacaaagaggtcgtttcctatctgaaaaatggtatcgagtctggacgatttccgacgggtagtcgcctgccttctatccgtcaactgagccttgactttcactgcagcaaggacaccattcaacgagccctgctggaattacggcacgaacaatacctctatgccaagcctcagagtggctactatgtattagaacaagggcaacatcaagacctagaaatcgaggttaccgacgaacatgccagtgcctatgacgatttccgactctgtgtcaatgaaaccttgattggccgagaaaactacctcttcaactactatgacaatcaagaaggattagaagacctaagacagtccattcacaaactcctctttgagcaagctctctactgcaaggctaaccaactagtactgacttctggaacccaacaagccttgtttatcctctctcaaatatcctttcctagacaagccaaggaaatcttggtggaacagccaacctaccatcggatgaatcgcctcttgattgcacaggggctggactatcaaacgattgaacgaggcattgatgggattgacttggaggagctggaaggccacttcaaaacaggaaaaattaagtttttctacaccattccccgatttcactatcccctgggacattcctattctgagcaagacaaacgatctattcttaacttagctgccaagtatgatgtctatatcgtagaggacgattatctgggtgatttggactccaagaagggccaaaccttccactatcttgatacagaggagcgtgtcatttatatcaagtccttctcgaccagcctttttcctgcccttcgtattacagcactcattcttccaaatgctatcaaagaagcatttgtggcctacaaaaatatcctagactacgacagcaacctcattatgcaaaaggccctgtcactctatattgacagtcaattgtttgaaaaaaatcgtttggctcgcttgaccaatcatgaatcttaccaaaaacaaatcgaggaaaggataactaaaacaccttgtccccttcctcattattccctacacgatggtttattgctagacctgagacagtatcctaaaatcgccagtctcaaacacagtcaactgggcttggacttctttgaagaggcctatttaagcacctgtccttatcaatttgccaaggtgtccctagacaatctggaaaatgttttaaactatttaaaagcagaattggaatgacatccaactctgctttttcttattcttcaacttcagttagacttgctgctttttcaagatagctttggtaagttccttcatccttaagtttttggacgaccttgtctaccacttctttcaaatcatcactattttttctaagagcaacggcattggcgtcgccgtccttcatcttcaagctgacagttgcgacagctaagccagcgtttttagcagcataactaagtgcaacaggctcatccatatgaacagcatctatttttccagcctgcaattcattgactgcttcacccatattagttagggaagttaattgaacttttggcaattgttccttgaccattgattctggaacagtccctttttgggctgcaatattagcactttctaggctagttaaatccttgtatttttccacatcagccttacgaaccaagaaactaatcttgttttcatagtatgggattgaaaaatcaaagacttcttttctctcgtcagtagcactaattcctgcaactgctaggtcagccttaccagtttgaagactggtcaaaacattgtcaaaactcatgcttgagatttccaacttaaccccaagttcatcagcgatagcctgagccatgtcgatgtctgcaccgactacctggttctttccatcaaccaatgattgaaattcaaagggtgcatagtcaggactggttgccacaactaatttccctttttgtttgatagcatccacagcagactgagaaccattagaacctgactgacaagctactaagaagaaacttgcaagaaaattacataaaacaaatatccatttttttgatttcataaataaacaacctctctgttaattttgtataattataacgatatccaagttacttgtcaagtgttttttaaatttttatctcaaaaatattttttcgttcaaaaaaaggagccatcagttgatttcaagctcccttttatacagaattaaactattttatagttcgacaatcttacctgtttcaaagtagacaacccattcacagatatttttagcatagtcaccgatacgctccaagtaggaaataacttggaaataatcacgacccgtaacaatggcttctggatttttcttaatctcttcagtcgcaaggtcacggatagtttcaaaatagtggttaatttgctcatccatggaggccacccggtatgcgtcgtcaacagaaccattaagataaagatcaagtgctgcttccacaacgcttttaacttcacgtcccatttttttaatttcttcctctacagctggaatgcgctcttcccccttcatacggatggttgcctgggcaatggctacagcgtgatcccccatacgctccacatctgatacagccttaaggacagtcaagactgtacgcaaatcttgagagactggttgttggagtgcgatcatttcaaatgatttcttttccagtttcacttcgtattcatttacttctgcatcatcttcgatgacctcttttgccaggtcacggtcatgcgtgacaaaagcacgtaccgtacgattgatttgtgagagcacttcttgtcccatagcgtagaactggttatgtaatttctctaaatcttcttcaaattgagatcgtaacatctttcatctccttatccaaattttcctgtaatatagtcttccgtttccttgtgttggggatcaaggaacatctgcttggtatcattaaattcaatcaaatctccatctaggaaaaatcctgtcttatcagagatacgtgaagcttgctgcatggaacgggttaccagaagcatggtgtacttgtcttttagaccatacaaggtttcctcaattttaccagctgaaatcggatccaaagccgaagttggctcatccaagaggatgattttaggactagttgccaagacacgggccacgcagacacgctgctgttgaccacctgacaatccaatagctgaatcatatagacgatccttgacctcatcccagatagaggcaccttgcaaggctttttctacggcttcatccagaacctgcttatccttaattccattgatacgaagcccgtagacaacattctcatagatagtcatagggaaaggattaggttgttggaaaaccattccgatttccttacgtaattcaaccgtatctgtacgcggactgtagatgttgtgaccattgtacaccacggatccagttgtggtcacctctggattgagatctcccatgcggttgagagacttgaggagggttgacttccctgatccagatggaccaatcaaggctgtaatttccttaggttggaaagatagggaaacactattcaaagccttctttttattataataaacggacaggtctgatacctgtaaaatcgcatctgtcatacggtttcctttctaaccaaagtgaccagatacatagtcattggtggactgtagcttggcattttggaaaatagttgcagtcttgtcatactcaatcaaatcacccaagtaaaagaagcctgtatagtcacttgcacgagcagcctgctgcatattatgcgttacaatgatgatggtaaagtttttcttgagctcaaacatggtctcttctagttgcatggtcgcaatcggatccaaggctgaggctggctcatccattaagaggatatctggcttaacagagatggcacgagcgatacagagacgttgttgctgaccacctgataaggtcaaggctgacttgtggagatcgtctttaacctgatcccagagggcagcctgacgaagggaggtttctacgatttcatctaggacttgcttatccttaactccagcacgttcatgcgcaaaggtaatattacggtaaattgacttagcaaatggattgggacgttgaaaaaccattccaatgtgtttacgcatttcataaacgttgatttctggacggttgacatcaattccacgatagagaatctgcccagttactttagcaatatcaatagtatcattcatgcgattgagactgcgtaagtaggtagatttccccgatcccgacgggccaatcaaagctgtaattttatttctttcaaattgcatatcaatccccttaatggattcatttttaccatagtaaacatggacatccttagtagaaagggctactttttcttcaggaaaggtaaggatatgcttctcatcccagttatatgttgacatggcttctcctttaggcagcggttaatttcttgtgtagatagcttccgaacttacgagctccaaagttaaaaatcaggataaagatcaggagcacagcggcagaacctgctgatacaatggttccatctggaatagtgccttcactattgactttccagatatggacagccaaggtttctgcttgacggaagatagagatggggctagtcacactgaggatattccagttagaccagtcaagagctggcgccgattgccctgctgtatagatcagagctgcagcttcgccaaagatacgaccagatgccaagacgacacccgttacaatacctggaagcgcttccggaataacaacatgaaccactgtctcccagcgagaaatcccaagagccagaccagcctcacgttgggtatggtgaacgtgtttcaaactatcctctacattacgcgtcatctgaggcaagttaaagactgtcaaggccaaggcacctgaaatgattgaaaatccatactcaaactggactacaaagatcaagtaaccaaagagacccaccaccactgatggtaaagaggacaaaatttcaatacaagtccgcacaaagttggtaacaggaccttttttagcatattcagccaagtaaatcccagctcccatagaaagaggtacagaaataatcaaggtaatgaccaataggaaaaaggaattgtaaagctgaatgccaatcccaccacctgcttgaaaagcagaagaccttccagtcaagaaagaccaagagatatggggcaagccccgaaccaagatatagagaatcaaggaagccaagattgtcacaatgatgctagcaatcgtatagaggacagctgttgcaagtttatctaatttcttagcgcgcataatttttctttcctctttctttcgtaatcaatttaatcacactgttaaaaactaagctcatcaagagcagtaccaaggccagtgaccagagaacattattatttacagttcccatgacagtgttcccaattcccatagttaatatagaagttaaagttgcagctggtgtggtcaaggaagttgggataacagctgagtttccgacaaccatctggatagctagagcctcaccaaaggcacgcgccatcccaaagaccactgcagtgaaaataccagaacgggccgccttcaagatcacacgccagatagtctgccagcgagtggctcccatagcgaaactggcttcacgataataacgaggaaccgcacgcaagctatccgttgtcataaaggttacggtcggcaaaatcatgacaaagaggacggaaatccctgacaaaatcccaaaaccagtcccaccaaagacactgcgaacaaagggaacgacgacttgcaagccaataaatccgtacactactgaaggaatcccaaccaggagttcaatagctggttgcaaaatcttcgccccttttggtgatacttcggtcataaaaactgctgcaccaatagcaaagggtgttgcgataagggctgagagaatggtaacgataaaggaacccaaaatcataggaagggcaccaaattctttactagaaggattccaagttcctcccaaaagaaagtcaaagatattcacaccattgacaaagaaggtcgacaagcctttttgcgctacgaaaaccaaaatcatggccacaaggatgactatcaaagaaagacaggcaaaggtcaaaccttttcctaatttctccagacgagaattctttgatggaagcaacattttcttagctaattcttcttgattcattattgtctcccttccaacactgtcacagttccggcagcatctttttcaaccttcatttccttaatcggaatatacttcaatcctttgacaatcccttcttgggtctcatccgagagaacaaaattgagaaattctgcagccaactcattgggctgccccaatgtatacatatgctcataagaccacaagggccaattattgctacttatattttctggacttaagtcatagccattcaacttcatgcttttgaccgaatcatctatataggtaagagataaataagagatagctcctggactttttgatacgattgattttaccgctccatttgaatcctgctcctgactttgcatggcagactgaccttccataatgacagtatcaaaggtagcacgagagccagagccggctgcccgattgataacagagatgggtaagtccttaccaccaacctctttccaattggttacctcacctatgaagatttgacgaagttgctctgtcgttaggttatcaacatcaacctccttattgacaatcagagccaagccagctaccgcgaccttgtggtcaacaagagcagaagcatcaattccgtctttttcctcagcaaatacatctgagtttcctatatcaactgccccagactgaacctgggacaagcctgtaccagaacctcccccttggacattgaccgtttttccaacatggatcgtgccaaattcatctgccgctacttcaaccaagggttgcaaggcagttgagccaacagccgttatggattctccacgatcaatccagctagcacagcctactaaacaagccgtcagccaaaaagcgataagagacagagcaagcttttttctttttttcactgtttttctcctcgaaaataattatgaatactgtgaattttttaagtagttctttatgagttgacgcatgaattcttaccaaatttctgcgcaattgattatttatataatataggctatattactctttcctaacctccttttttcatatgtggataaaatctcttgtctatcccttcccccattgtcacccattatagtcatttcgtgtctctttttcccctttttaatgcaagggaaattactctccttagatgataatccaaaagctagaaaggtatctcaaacctctctactctcccagactagtttacaactaaaaggaaaagattctattttatgagaaatctagtttacaagcggtaagaacgctaataactaaacttcttgtactctttgaaaatctcttcaaaccagtgttttgagctatctatggctagcttcctagtttgctctttgattttcattgagtagtaaaactacatgtaatggcaatcaagatatcaagaatcatcctactaaaaaaatccatactttcactataacatagaataagatatttgactagcattttcatttgaatctgaggccttttggaaaataatttttcaaaacatttccagtaacctttgcaaagcccaagccattgcctttaaccaaaacttggtaccaaccatttggcagactttctgccagctgaacggtttctccagccgcatacttgacaaacgcttcttggccaatttcaaccgactgttcgacctgactcggtttcaaggctaaaccaagagcgaaactgggctcaaagcgtttcttcttaaaagtacccagatgcagtccattgcgagcaatcttgagcttccataaatctggcaaaagttctggcaagagataaagctggtctccaaaaatctgcaagatacccggtagattgaccttcaaatggttttgggcaaattcctgccacaaggcaacttgttcacggctgaggttactcttacttgccttaaatttaggagctggattgttacccttaaactgtagatgggcaacaaactgaccctctcccttaaactgatgaggatacatccgagccgtttctggcaggtcaataccagctaccattccattgatatgctctactggcaacaagtcaaaatcatactcttccagcaaccaattgacaatctcttcgttttcctcgggtgcccaggtacaggtcgaataaaccagatgaccaccttcagctaacatggtcactgcatcctccagaatttctctttgcaagctagcacattgactcggataatctaagctccaatagtccatagcatcaggttgcttacgaaacattccttcaccagagcaaggggcatcaagaacgattaagtcaaaatagcctttaaagaccttgaccaagcggtcggcagattcattggtcaccacgacatttgtcgctccaaaacgctccatgttttcaaccaaaatcttagcccgtttgcttgaaatttcattggaaacaagtagcccctcccctgctagataggctgccagttgagttgatttgccccccggtgcagcagccaagtccaagaccttcataccaggactgggttgggctacttgagccaccatttgagcagcaggttcttgcgaataaactaaacctgtagcatgctcaggcgatttccctgaaaccttcccatagtggccccaaggggtttgagtaatggcatcagaaaaggaaagttgctcttcttttaagggattgacccgaaaggccgaaaccgcttcctcctcaaaagaggcaagaaaatctcttgcctcatctcctagtatctctttatatttttcaacaaatccttctggaaattgcatttaagttcttttcctttcgtaaatataggactgaatttcctcctgcatctcaagaggcaccatcatgaccggctgtctggtttgaaaatcaggagcttcaccaaaaagggtcacaacccgatagcccagactttcccctaaaatactagctgcggcataatcccatggttgcagataagtgagataggtcaacaaacgccctgacaaaatcttggcaaaactaatggccgcacttccatagacacgaacaccaagaaccgctcggctcaaatcagccagcccccattcattggtttccagcataccactattccctgcaatgagaaaatctccaagtggtttagttttaaaaggagctagggacctatcatttagacaaactggaaattccccaccaccgtggtaacaatcccctttgaccacatcataaatcagaccaaactgtccctgaccattttcaaaataagccatcataacagcaaaatcttcctgctgggctacaaaattattggtaccatcaatgggatcaatgacccaaaccttgccctcttgaaccgaggctcgcagacaaccttcttcagcacaaatcttatcctcaggataacgggacaaaatctcaccaaccaagagttcctgaacttctttgtccagtctggtcaccaaatctgttggagaggacttggtttcaacacgcaagtcttcctgcatatggtcaagaatgtactgacctgctttcttaacaagctctttagcaaattcaaatttactttccaagagaaatctttccttcccctttttctttggcagcctgaactgctcggtaaagtgaatagccactaaccgtttcaaattctcgtcccaaacgtttctcttcgctcttgcttggcacgaccgctttgaatcccttataggagtccagtaactttttagcctctactttgccttcataggcagcttcaacatcattaaaaaaagaaagcactgaagcaagttcttcagtgctccacgacaaatctagtgggtaactatactgtttgttcattaactaataccagctctcattcttgcttcttttagttcttgcttacgataactacgagggagaaaagcacgaatctcatcttcattaaaaccgatttgcatacgcttggcatcaataataattggacgacgcaaaagactaggatactgctcaatcaaatgaagcaattccgataccgaaatactctctacatcaatattcaatttttgaaaaatttttgaacgagttgaaatgatgtcatcagtaccattttcggtcaaggaaaggatgtgttgcaattcttttcttgttaaaggactggtcataatattgtgttccacaaagggaaccttatgtttttctaaccaggccttagccttacgacatgatgtacagctcggtgatagaaatagtgtaatcatgcttttctcttcttatctatactttgctacttctattatacaaaaaaataaagcgcttgactagggatttttagaaaaaaagcctattttttcaagaaaaataggctttttgcgaacgattgacacaattggatttggttaattcactcttaacgatggttttaaacgatatatatttttatatatgtaaattaaaaacatctttcctttcacttcctacgacttttcagatacagatagccaaagaagttttcatagagggcaaaaaagaggaggaaggcatgaagaaagaaggtctctggcaaaatcataataacaggatccttggctggatcaaaaagccaggtatcatctcccacaaagagaatttgatggaaaagagtaaagaattggtcaaaaccaatcaaaactcccccaagtccaatcatcacaggtaagactactagagccaggagactttttcgataaagagacaaaaagtcctttttcacaatcctattgacaaagacatagaaacttggcagtgtcactagagctactagctgaaccaaatgaaagagattcttgaccactgcgaaatggtgcagaccagctgctgacgaacgaaaatcaggcatctgtaagacctgactaaaaggattggtcagataattcatcaagatatgaaaattgtattgaatggtttctggttttagatagactcgattcgttaagtttagccactgaatctccataggatagaaaatccaagccagataaatggtcagaaggatggagagggagaggagaaagagcatagagccccaaaagatcaatttagttttcatcaaaatcccactccgcaaggctagaaaccacatgtgtcggtgcgattggcaggccagctacttcttctgccttagtaaaacctgtcgtcaccaagagcgttggaatgccattgtcaatcccagcccgaatatcagtcaaataattgtccccaaccatgattaactcttcacgttccaaacctaagtgctcaaccgccttgtccataatgatggcatttggttttccgatataaaccggcttcactcgtgtcgctacttcaagcagcgtaatcagtgagccagcacctggcaaaagaccgcgttccgtcgggatgttgaggtcaggattggttccgataaaatgggcacccttttgaatagcaagagttgctgtggcaaatttttcatagtcgacttgccaatccagaccaactaccacgtaggcaggtttttccttgtcttccacataaccagccgccttgatggcttccttgagtcctgcttctccgacgacatagacggtcttttcaagccccaaatcattcatatagtcgatggttgccaaagtcgctgtgtagacagtcgataggggcgtatcgatattaaaattctgagccaacatctccttaacactctctggagtgcgggttgtattgttggttacaaagagatagggaatgtcccgcttttgcaattcatgaacaaaagtctctccagcagggattcggtctttccccttataaatggttccgtctaaatcaattaaatagcctttatatttcatctatttctccctaagccttttttatttcttgccaagtaatgattgcttgggcattgataaccccatcacttgtaatttcatgcttgctttccagtccagtccgttcaacagccgatgtaatcaccccacctggtcgaacttccttgacatacttgaggttgattttcttgggaatatagtgggtcaaaaaatccgctcccatgacctcaaaaatccagtccaagtatttactgttattgacatgaccattcatatccaagtcgtaaaaacgaacatggtaatccttgctgatcggttcttccaaggactcatacttcggtccacggataagttttttatcaaaatcagactggtaaggagccacaatctcaggttcaacaacatggacttttcgactgtcgcggtccatgagaacaaaggtcgccatcatgtggatgagctcctgctccgcttcattataaatagtaaagcgacggtagcaaaaaagtcgattgtagctcaaggcttccgtttcgatggtaatttcttccgcaaaacgaggcaaacgaaccacctcaatatcatattctacgataatccagaccagattatattcttccaaaatggccttatcactaactcccagttcaatcgactgcatccctgaaacttgcagtgacagcaaaatcacatctggaagtttgatatgaccgttcatatcagccatatcaaaaggaattttcattttcatttgataagttaagcccatgatcctactccaaaataaatcgttctgctacagtatctcccaaaaagagacctctctttgtcatgcgaacgtggtcaccctcaatctgcatgaggccttgttgaaccaaatctctgacaatttctccataaagtccagcaaaagactgtccaaatttttcctcaaatcgcgccatggaaaccccggatttcttgcggagtcccaagaacatttcttcttccatttgctccttttgactcaggtgatcttctgtaatacaagcattgccttcctcaaccgcactgagataatgacgaatgggaccatgatttttatagcgtactccattgacataaccagatgcccctgcaccaataccatagtattcagcattgtcccagtacatgagattatgacgactttcaaaaccgggtttggagaaattagaaatctcataatgctcaaaacccgctcgctccagctctgcaatgatgtactcaaacatctccgcttctagttcctccttaggcagaggcaatttcccacgtcgcatccggttcataaagaccgtatggttttctaaaatcaaactatacaaactcatgtggggaatatccaatccaatggctttagccacattttcctttacttgctccatggtctgaccaggcagagcataaatcaaatcaatggagatattgtcaaaaccagccagtttcaggcgatcgatattttcataaatatccttctccaaatgactgcgcccaatctttttcaacatcttatcatcaaaggtctggacacctagcgaaacacgattgacagccgaatttttcaaaacagctatcttatccgcatccaaatcgcctggattggcttcaatggtcaactcttccaagacagacaaatccaagtttttagtcaagccattcagtaacacctccagttgcggagccgacagggctgtcggtgttccaccaccgatataaagggttgacaacttttcaatatcataagaacgaaactcttccagcagatgctctaaatagctgtcgactggctgatttttgatgaagacctttgaaaaatcacaataataacaaatctgggtacaaaatgggatgtgcacataggctgacgttggttttttctgcatagtaattattataccacaaagactagattccagataaaaatcaccatccccagatacatagtccgtccggagatggtgatggtttattcttctgttatatcaatcacaatctcttctgagtcatcaagagcttcggctttttcttgccattgctccttgagattatttaattgattttttgatgcttctgtcgcttgaaaagcataggatttagtttgagcaagtatactgtccacagtgatttcacctgactcaacctgttcttttgttttcagaacaaaatctgtagcctgctccttaacttctgtcagtttttcacagacttgctccttggcatactccggatcttctctcaaatcatctagaaaatcttgagcctgactgcaaacttgtttgcccttatcacttgttaaaaacaaggcaagagctgcacctgaaacggttcctaaaaggattgaggataatttacccataaggattctccttttttattttttgaaaaatttacttgcaagacgaagagctgacagacttgcaccagtcttgagtgtttttgaaccagctgatgaagctttcttgctcaagacacgcgcatggtcattgaggtctgaaacagatagagataaatctgcaacagcactgaagagtggatcaatcgtagccaccttgacattgatatcatctgccaagacattgaccttagccaacaactcattggtgtgatgcaaggtcacatccacatctgaagtcaaggttttaatcgtcttttctgtttcatcgatgacacgaccaagcttttgtacagtaatgatcagatagaccaaaaagacaatcaaagctagggcaacaagaatatatgcaacttctaacatttagttttcctcctctgtaatatagtaaggggccttctttcgattttgataaataacgatcattataccgagaccgataaggacaactgacagccattgggacactcgaaagccgaagaacatgagactatctgttcgcataccttcgataaccatacgaccgaaaccataccaaatcaagtaaaaggccgtgatatgacctcgtctgagactcttccatttccgtctaaaaatcagaatcaaggcaaagccaagcagattccatagagactcataaaggaaagtcggttgacggtagctcccctcaatatacatctggtcacggataaagccaggtagataatccagattatccactgttgcaccataagcttcttggttaaagaaattaccccaacgccccaaactttgagcaatcataacgctaggcgccgcaatatctagaaaatcccaagtattgatgagtttacggtcagcaaagatatagagcacaagagccccagttatcaaaccaccgtaaatggccaaaccaccattccaaatggcaaaaatctctcctaaattctgactatagtaatcaaatcggaaaataacatagtagagacgagctcctaaaatagccaagggaaaggctactaagataaaatctaaaatatcgtctggtatgatcttctttctaggtgcttctttcatggtcaaataaaccgcaagaatcaagcctgtcacaatacataaggcataccaacgaatggctaggggtcctagttgaatagcaattggatcaagcattttgcacctcatttcgagcgattagacttgtcagtcgttcgtcgaacaaacgggtcgcatcaaagcccatttccttggcacgataattcatggcagctgcctcaatcacaacagagatattacgacctgttttaactggaatacgaatacgaggaatgtacgccagaaacttcaagttcctctgcattatttccaagacgatcaaaggtcttatgcgtatcgtaattttccaaatagacagcaagctgaacctgtgaagaatccttgacagcactcgcaccgtagagactcataacatcgataataccaaccccacgaatttcaatcaagtgtttcaaaatttcagctggttcaccccagagagtaatctcatccttggcaaagatatcgacacggtcatcggctaccaaacggtgaccacgtttgacaagctcaagacctgtctcgctcttaccaattccactatctccctgaatcaagacgcccatcccataaatatccatcaagacaccgtgcacactggtacgttctgccaaacgagaatccagatagctagataactctccagataaacgactggtagctgcacggctggttaaaatagcaatcttacattctctagcagcctttaacatctcctctggaaccaccaaaccacgggcaacaatgactgctggtgtctcaggtagaaacatttttttcaaaacttcataacggctgttggaaggcatgctgatcagataagaccactccttcatccccaaaagttgaatccgctctggtgtatagtagtcaaaatagcctgtcatttcaagaccaggtcgcgtaatatccgctgtattgatttccttttcaagcaattctggttcaccatagacaatgtctagtctaagcttttcaatcacttcttttactaaaaccgacatcatttcctccttcaaatgagttcttctctctattatatcaaattgtaggaggaagtttcagatttttgcaggctttggagtatttatttaaaagaaaaaggactagatttctctagcctttcatttcaattagaattttttacgtttacgagctacttctgatttacgtttacgttttacagaaggtttttcatagaattcacgtttgcgtgtttcttgaagagtaccagctttagtaaccgcacgtttgaaacggcgaagtgcgtcgtcaagagattcattcttacgtactactgttttagacatttttttcactcccttcaagttcaagatctattctattttacacgtaaaaggaataattgtcaagcaaaaatgcggtttaattttgattttttcttccatttatacaagagttgaaagcgttcaatagaacattgcttttttatttttagagtaagctaagcgcttcagcatctgcgatgatggttacatcagggtgattttggaggctacttgcaggtaggttctcagtcactgggccagatactgttccggcaatggcttctgctttcgactcaccgtaagcaaaaagaataatagacttggcatccaaaatgtttttaatccccattgaaatagcttgggttgggacgtcttcaatcttggcaaagaagcgtgcattggcttcgatagtagactggtcaagttctactagatgcgtttgactgtcaaatggagtgccaggctcattaaagccgatatgcccattgcgaccgattcccaagatttggaggtcaactggatggtcagccaaaatttggttgtagcgttcaacttcagcttcagcattgtccttaacaccacgaggcaagaaactttctttaaatggtttttggttgaacaagttttcttgcatgaagtaacgataagactgtggattgtccccatcaaggcccacatactcatcaaggttgacactggttagatttgaaaaatcaaggtcactctcaacaatttccttgtaaaattcaagtgggctacttcctgtcgcaagtcctagagtttgagctccattagccaatttttccttcaaaatctcaaaagcaacttttccaccttgaacttggttttcaactttaataactttcatcttttcatcctccatttttgtctatatttattatatggtatagaccaatttttgtcaagtgaaaacgatttaatttctaaaaaaagagcgtccaaacttgaaacgtgttataatggataggattagaacttagaaagaatgaacaaatatatgaatacagctgattttgatttccacttgccagaggaattgattgcccaaacgccccttgaaaaacgtgatgcctccaaactcctcatcgtcaaccgtgagacaggagaaatgcaagataaacatttccactctattattgatatgctggaacctggtgatgcccttgtcatgaacgacacccgagttctccctgcccgcctctatggtcaaaaagtggagacaggaggtcatgtggaacttctcctccttaagaacactagtggagacgagtgggaagttctggctaaacctgccaaacgcctcaaggtcggtactcgtatcagctttggtgatggccgcctcagcgctgtcgttacagaagaattgacccacgggggacgcattgtccgctttgaataccaaggaattttcctagaagtcttggaaagtctgggagaaatgcctctgccaccttatatccacgaaaaattagatgaccgtgaacgttatcaaaccgtctacgccaaggaaagtggctctgctgcagcaccgactgctggtcttcacttcaccaaagaactgctggcagaaatccaagctaagggtgttcatctagtctatctgactctccatgtcggactcggaacctttagacctgtttctgtggataatctggacgaacacgaaatgcactcagagttctatcaactttctgaggaagctgctgccacccttcgctctgtcaaaaaaaatggtggtcgtgtcatcgctgtcggaaccacttctatccgcaccttggaaactattggttccaagtttgatgggcaaatccaagcagattctggttggaccaatatctttatcaaacctgggtatgagtggaaggtcgtggatgccttctcaaccaacttccacctgccaaaatcaactctggtcatgttggtttctgcctttgcaggccgtgaattagtcttagatgcctaccaccattccatccaagaacactaccgcttcttcagttttggtgacgccatgtttatttattgagaaagaatttctctaaatcttctaataccaataaatcgctaagatattatttcaaagaacatctacaattgaaactctagctagctgtagaagaggcctagtacattgaaattaaaatgcttccccctagcttcgaaaatattgccatagattgcgttgactctccaaattgattcatctatattttatttcagcttcctatactttcttcgctgtttgtaaatcaaaatgcaagacacatgagtagcaccatatttgttactcttatctgtcctctcaagagactattatgagttatttcagaatcattcactactttgaccctgactctccttagtctcaaaatcaaagacttatactcttcaaaaatctcttcaaaccgcgtcaacgtcaccttggattatatatgtgactgacttcgtcagttctatctacaacctcaaagcagtactttgagcaacctgcgactagttttctagtttgctctttgattttcattgagtattaaacaaaaagtgaacaaatctgaattctaatgtacagaagactaggcttgttcacttttttatagtcgctataagatgaccttatctatagctttttatatataattatatattcagacatactattatcaattttgtcgcagggaggaatctgttaacgcacccattcaccattatcattgactctatagccatctatacttgtattgaccgctaactcacccgatgtatttacataataccatttaccaccaacttggaaccattgattgactttcatagaaccgttgctgttgaggtagtaccatgaactattaacttgtacccaacctgttgccatggaaccatcagtattataaaaataccacataccattttcttgtttccagtctgttgttggagcaactgctttagctggttctactgctacatctgttccttggttagatgtaacagatacaggatacgaaggaatagatgattgctcaggaacaacaactttttcaggttctctcgtccctctccttatacgtctttttaccatctctttagtaatttgacgagaagtagtttcttcaattgttccatcacgttcatctacagtatagattgtagtaagagtaatttaccaatttctcctacttcttctacttcttgacttttatcaagagttgggccatcgagatattctgtttcgattggaatttcttggacaagaacttggggcttggttctttttttaacaactcttgtttgagagtcttttttttgacttaaagtactctcagttacttgtccactctttccatctacattataagttatcgttgtaactgttttcccattctttcctagagtaatctcttgctcctgtcctgcagaaaggtcattgtctgcttcatatttagtagcaaatggaacaagaacttcttcaaccttgcttttagctggaactttgataactgtatccgtggcttcttttctatcaacagtaacctgttcggtaacataaccagtctctggattaacatcgtaggtccttgtcgtagttacatagccatcctctccatcaattgtaacaggattttcactacggtcttttgtttcatctttttcataacgaattcgcgtacttgaaattttcttggttactaccttaggtttagtcgctacttttacaataatatccccattgtcagcgtcatcatactctattccctcttctttatctctagtatcatctctgacatattgaatcccatcagcagcatgaacaaaacttgtattcagattcctcctaaaaataaagttagcccgattaccgcagaaccaaaaatctttccgagtttacgtattgcatagcgcttattagtattagattttgccattacatcctacttctagtatagcatcttttctatcaaacgttaaacaatatactttatatataaaatagacttagaatgatatattgattattgaactaacactttaactatatcgtaatcaatctcatatataaaggattgcagacatcttatctaaatacatgctaatatatttagatacaaacattccaacttgataattttcactcatctttcatcattccttatacaactatgcagtataaatagaatagttttctcatcagaatgagactattttaatattagatccccaattattcaccccaaatctaaaaaccatccagaatccttgccttagcttagatcctggatggtttcttttttcacccaatgggtgttttttactagacaaaaaagagtttcccctttatggtataagtgtagaaaaaaacacaaaaagaaaggaaactcacatgaacagtttaccaaatcatcacttccaaaacaagtctttttaccaactatctttcgatggaggtcatttaacccagtatggtggtcttatcttttttcaggaacttttttcccagttgaaactaaaagagcggatttctaagtatttagtaacgaatgaccaacgccgctactgtcgttattcggattcagatatccttgtccagttcctctttcaactgttaacaggttatggaacggactatgcttgtaaagaattgtcagctgatgcctactttccaaaattgttggaaggagggcagcttgcttcacagccaaccttatcccgttttctttccagaactgacgaggaaacagtccatagtttgcgatgcctcaaccttgaattggtcgaattctttttacagtttcaccagctaaaccaactcattgtagatatcgattctacccatttcacaacttatggcaagcaagaaggtgttgcttataacgcccactatcgtgctcatggctatcatcctctttatgctttcgaggggaagacaggttattgtttcaatgcccagcttcgtcctggtaatcgttattgttctgaagaggcagacagctttatcacacctgttttagaacggtttaatcaacttctctttcgaatggatagtggctttgcgaccccaaaattatacgatttaattgaaaaaacagggcaatactacctcataaaactcaagaaaaatactgttctgagccgtcttggagacctttccctcccttgcccacaggatgaggacttaaccatcttgccccactccgcctactcagaaactctctatcaagcaggatcttggtcgcacaagcgtcgtgtctgccagttctctgaacgaaaagaaggaaacttgttctacgatgttatttctctcgttacaaatatgacgagtggaacaagccaagaccagtttcagctttatcgtggacgtggtcaagccgagaatttcatcaaggagatgaaggagggattttttggcgataaaacggatagttcaaccttaatcaaaaacgaagttcgtatgatgatgagctgtatcgcctacaatctctatctttttctcaaacatctagctggaggtgacttccaaactttaacaatcaaacgcttccgccatctttttcttcacgtggtgggaaaatgtgttcgaacaggacgcaagcagctcctcaaattgtctagtctctatgcctattccgaattgttttcagcactttattctaggattagaaaagtcaacctgaatcttcctgttccttatgaaccacctagaagaaaagcgtcgttaatgatgcattaaagaacagtcgagatgaaaaaatcgtgtgacgcaccaagggaggagtctgcccttttgaggaaatctagcgaggaaaaacgatactggaacagcagaaagtaaaactgacctcatgaggaggaagaaagtggctcatgaggtcaggggttttgtaagttacatctagttgagagaggtatgaatgatttgggaatagttttctcatcagaatgagactattttaatattagataatttgatagaaaaaacatgaataaaattggttgaatttaattccctaactcgatagaggattctattttaaatttaacaacagctaggattacactataaaaagtacattaccacctgttcggctggagaatctagtcgattagctccctcttagttacaagcttaaagcgattttttaactaacactaaaccagattaaagaaggaactagaacatctgtcttgtactaatcaatatgctattttaaagtttcaaataaacttggaatgctaattattatatttacaataaatagttgacttcgatagaaacagaaaatagaattcaacattcttccctacttataccataataaataagatccgcaagatagccttttctctctacaccattaacaatggtttgtagataggacattccagccttttccatgacacgacctgaagctgggttgagactggcataacgtgctctgaccttttgaaaacctgcttgagtaaaacaaaagtccaagatagctttcaaagtctctgtcatcataccatttccccagtaagccttgcctaacacatagccaatttcacagcttaaatcagcctcgtctatcttaacaatgctgatatctcctattacttgctctgggttttcttttagacaaatggcccatttataatagttgagattagtataggaagcaacccaattgcaaatcgagtttcgagtgatttcgacatcaggatggggatcccaggtaacataggtcagattctcagcggatgaagcccaattttgaaacatggcttctgcatcactctccacaaatcttcttaaaatcaaacgttctgtctgtaatatttgcgtaccgatagatttcatgatgctacctcacttccttatttctatactcgtagtaaaaaggctcaactcagtaacagctagaaaacgagtttgtcttctaatttcttgacgcagttgctgcctggtttgaaatgcgctctagcaagctttttcaaacctagtcatcgttgcaggggtaagacgatgaaatcgaactcttcgagttactgaatctgcctcattttcttatttctaaactcggggttcaagatcccccagaccttctctcactttcttatttcaagatgagaggctgaaaacctccagtggaggtttttcttgctttttaatttcagggcaagaagctaaaaaggtcccccggacctttttactcccaaaagtcatcaaatacggtgatgggtaagtggcgtttgtgttggcctttgtgccaccagttttcaatggtcgcttgagcttctgggctgattgttttgccttctaggtagtcgtcaatctctgcgtaggtgactccaagtgcgacttcgtcagctaggcctggtttatcttcttctaggtctgccgttgggattttttcataaagggctggctctgcgccaagtttctgcaagagctgttttccttggcgtttattgaggcggtaaagagggagaatatccgcaccgccgtcaccaaacttggtaaagaaacctgtgatattttccgcggcgtggtctgttccaatgaccgctccgctatgggaaccagcaagggcatactgagcaatcatacggcaacgtgccttgatattccccttgttgaagtctgaaacaggactacctgtcgcttcaactgcagctgtcatggcatcagctgattccttgatattcacaaccaagctgacatctggctggatgaaggctagggctttttgagcatctgcttcatcagcttgcactccgtatggcaggcggacagcgataaatttgtagctatcgtctcccgtttcagctcgcagttcttccatagctaattgcgccaaacgtcctgccaaggttgagtcttgtcccccagaaatccctagtacaaaggtttttaggaagggatgttttttcagatatctttttaagaaatcaatagaacgacggatttcttcctgggcatcaatcactggtttgacacccagctcttggataatcgtttcttgcaaactcattcttcttctccttcaccaagggcttccttgcgcatcttatcaatcaagtccatcttatcttgccatacatcacgcgccaaatccactggatagtgctgcggattgagcacacgcttatactcatcccacaacttgtcaaattccttacgggcataatcctgaatgtcagtcaaactaggcaagttgtaaactaatattccttctttgaagatatccaccaagagaggaacggcatcaaaattacgaaccgtcttcttgatgtatgtataggtcggatggaacatcttgatttctgtcatgtcgctaatatccacaccatcataagtgatatagtcgccttctgacttgcctttttcacgactggtaatgcgccacacctgcttcttacctggcgtagaaactttttcagcattattagacagcttaatcgtattgcgcatctgaccagtttcatcttcgattgcaacaatcttgtaaaccgccccaagagccggctggtcataggctgtaatcagcttggtacccacaccccagacatcaatcttggccttttgcatcttgaggttaaggatggtattttcatctagatcattagaagcataaatcttagcctctgtaaatccagcctcatccagttgctgacggactttcttagaaatgtaggcaatatccccagagtcaatccgcacacccataaagttaatctgatcacccagctcacgcgccacctgaatggcagctggtacaccgatgcgaagggtgtcataggtatccacaagaaagacacaatttttgtgggtcgcagcgtaagccttgaaagcttcatagtcattgccataaacctgtaccaaggcatgggcatgggttcccaaaacaggaatgtcaaagagcttacccgcacgcacgttgctggttccattggcgccaccaatcacagctgcgcgtgttccccagatggccgcatccatttcttgagcccgacgtgtcccaaactccatcaagggttcatcttcgataaccgaacgaatacgagctgccttcgtcgccaccaaagtctggtagttgacgatgttcaaaagagccgtttcgaccaactgacattgggctagaggtccttccacctgcacaatcggttcattagcaaaaaccaaatccccttcttgggcagaacgaacggtcaactccaacttgaaattgcgaaggtaatccaagaacgccccatgataaccaagcgactccaaataggctatatcactatctgaaaaacgcaagtcttcaagatagttcacaattctttctaaacctgcaaaaaccgcatagccgttcttaaaaggctgttggcggaaatacacctcaaagaccgccttcttattgtgaatcccttggtcaaagtaaacctgcatcatgttgatctggtacaagtccgtgtgcaatgtcaaactatcatctggatacatacttttcctacttccttagctagaaacccatgaaaattttcaagaactttcatgtattccaataaattagtactattatatcacattttagctggattgagaaaagagtaacaagctattctccactctccaattcatccatatcttgttcaaattttttctgagcccattcgccatagctcttaagaccaagattgccaataaagatccacggaaggtaaatgatataagtaatgacccaagcagacaggtatttaaaattcaaaggattgtgctgataaatttctatgttgaattgataattctgcaacatcaaaagagccgtaatagccaaggttaggaaaaaacaacccaaaatcgtaaaatgaaaacgaccatagtaggtcactcccagataacgggcacgattgaaaaagtaaaatgtccctatgatgataacgattagcagcatattagaattaaaaaggcttggtgctaatactgaaatgatataagataggagcgacaaagcaatgcagatatagaaactttcagagcccgctttattgaacagttgttcttctctttcgtctagtaattgagaataataaaatctatttttcatcttcttcctcccaaaatagttggtctagggttttccctaaacatctgcaaatagactggcagagcgagagactgggattgtattttcccgcctctattaaaccaatagtctggcgtgtcaccccgacagcctctgccagttgaccttgtgttaaatcacgctctacccgagctaattttaattttaaatttttagccaccttcgtcctccttatagttttaatactcatctactcttaaaaaatccaaaaccaacacaagctatcagctatttattataaccccattaatttgcactccagtattatcttcagccgaaaatcagtattttaggttgtttgaaataaacttcctagtttactcttttatttttatttagtattagctttagtaagatcttttaaacgaatttttattgcttatatttcttgtttagtttagttggtttcatatcactattatataatgcttttggaaatgagcctagtataagtcaaaaacgtgttgaatagtgaaagcaggagcataccaagatgactgattttttactgtattttaggtatgcaaaataatactaaatgaaactaaaatgaatacttcttgcttttcttgagagtgaaaaagtacaataaaatgattgtagtgattagcacaagatactgactaatagacatcgtatttgaagccacaaatacaggtaaagaataaaaaaggaagaagttcaattgctttgataaacaaatcattactagtattcatcatcatcgtatttaatatattagagataaagagtagtaaagctactaaaataccaaataccaagccacttttcaatttgtataaatagaaaatgtaagataatagaaaataaaacaggactaacaaaattgtattgactacaatagctactataaaatttaatcctaaatcacctggaatacccaatttacttactatgactagtaacacaatgccattcaaagcataaataatggaaactgagatagcatatagaaaattagacaagacgtaaatcatccgattcttctgtttatttaatttcatgattataaccttcctttattttgaacgatttaggtaaatatctttaagcgtctcttttttagtttcaaaatcaactactttaatagagttttcgttaaaaaatttaaaaagctcactattttgaatattcccagacatagtaattctcaatccctcttcctaaacaatatcccaaaattcttgtttggtaatgaaaatgtctctatctgtagctgatgaaaaagctatctcaaacaagaaattatgactatcttttcctactttttgaaatgtcaaaagcccgttctccaagaaaagaactctctcacaaatttcttcaatgtcttctaatttatgactcgatattaaaattcccacattttcatgtaaagctaatttttttagaaccgctaaaactatttgtgatgattcaatatctaaaccattagtcggttcatctaaaatcaatatatcaggttccgtaacgagagttagaagcaaagctaatttttgttttgtacccaaagaataggtctttacttttttattaatagactgagtcaaatctaactcttggatcaaacatctaaatctttcttgattgtagtcaacaccatataaatttgacaaatattttaaattctctaaacctgttttagataaaaataattttggttcttcgattaaatacccaacattatcactgcttataatattacctgaagtcggttgattattctgaacaagaattttcatcaacgtactcttaccaactccatttctccctgctagaccaacaatttcacccttgttaagtgcaaaatttatatctttgagaatgattgaatgaccataatgcttacttacattttttattcctccattaatattattggttttctctttgattctcattaattttaaaaagttgcgcctctttttaacaatattatatcatatatctaacttaatgcaatatataaatgtcattttgtgaaattttattaacaaaaaactctctacaacaaaataatagagagttttctgcttattaatttttttcaaaatatctaagacatcgcttctttgtttaatttgataggctttgatgcctaaactccgactttatcacttaaaaaataaaaaagacagctaatctcttgcgcatcaagggatttcgccattctttaatctcgtttaagtgttgtatatggagctttgcatagttttttaaaactaaacaactacattaagcacgaactgtgacgctggttccatcttccttataaagattgataagcccctctttaagagctcgaaccatgtctcctgattgaacaggttgtgggactttaatagtcaatagttccattggatttggagcgcggtcgattttattgcctttagcatcatgcaaatcttcaatataggtttcaaaatgacggaaacctggaccataaaactcaacttggtccccttcgttaatgacgtttcgttgacgaatagttgctgtttgtgccgcatcatcataagaaaccacttcagcgacaaacttgtactcagggattttacgacgagcaccaaacaactgctcattttcagatggtgtaccatagtaaaatcctgtagccagttcacgttgggcaaccttccacatctcgtccaccaagtcttgtttgatagcttcaaacttttcaggactttcaagataggcatccacagccgccttgtagcagttggttactgttgatacatagtgaatagactccatacgtccttcgatttttagactgtccacaccattttcaatcatatctgagatatggtcaatcatagacatatcaacggctgacattgaaaattcttctggaatctcaccctgcaaactcttacgttctttcccaaatggcatatcgtaaaggtcgtacttccaacggcatgactgagaacatccaccacggttggcatcacgcatactctagacggattgttttgacaattctaaccttttagactttgcataataactattaaacagtcgaaaattaacccagttttaacaagtagtcaaaataccagataaaggaaaaaagtctttaaaatcttaaaaacgcatagtatcaggtattgaacaatcttgatattatgcgttttattgtgggaagatttacttcattttctcttgaaattgagttttctcctacttcaaaactagatgatttgctatttaaaatagcgttccttatgattttggcaacctggattaaagcgagaaaaacaaaaggggcaacttaagctttctttatattgcttatatgttagtagttttagacaaacaccacataaaataggcttatcctgtatcaaagataagggatacggctcaaaagggtgatgttctaatgaatcatgacaccgataacaagcataatactttttacaatcatagcattgtaaagcaataatatccagcttgctatggtaatgaatgcatcttgtttgcttatccactaagaaaccctgtgcctctatcatttccttttcctttcttaagctcgaactgtgacgctggttccatcttccttataaagattgatgagtccttcttttaatgcacgaaccatatctcctgattgaacgggttgaggcaccttaatagtcaatagttccattggatttggagcgcggtcgattttattgcctttggcatcatgcaaatcttcaatataggtttcaaaatgacggaaacctggaccataaaactcaacttggtccccttcgttaatgacatttcgttgacgaattgttgctgtttgtgccgcatcatcataagaaaccacttcagcgacaaacttgtactcaggaattttacggcgagcaccaaacaactgctcattttcagatggtgtaccatagtaaaatcctgtagccagttcacgttgggcaaccttccacatctcgtccaccaagtcttgtttgatagcttcaaacttttcaggactttcaagataggcatccacagccgccttgtagcagttggttactgttgatacgtagtgaatagacttcatacgtccttcgatttttagactgtccacaccattttcaatcatatctggaatgtggtcaatcatagacatgtcaacggctgacattgaaaattcttctggaatctcaccctgcaaactcttacgttctttcccaaatggcatatcgtaaaggtcgtatttccaacggcatgactgagaacatccaccacggttggcatcacgcatactcatgtggtttgaaagagtacaacgtccagagtatgaaatacacatagctccatggacaaaggcttcaatttcaacatctgtacgtttgcggatctcagctaattcttccattgaaacctcacgcgctaaaacgacacgagtcaagcctagctctttccagaactcaagggtttcatagttagtggcactggcttgggtagaaaggtggatttcaaggcctggtgcttcagtcactgcaatcataatcaaggctgggtcagatacgataactgctgcaatcccgatatcacgcagtttacggaaccactcaccagcaccagcttcatttccttcgtgcataaccatattagccgctacatagaccttggcaccatacttggccgcaaactgcacgccttcttccatctgttcgaaagtaaagtttcccgcacggctacgaagaccataggcctgaccaccgataaagacagcatctgctccatactgaacagctacctttagcttctctaaagtccctgcaggtgataaaacctcaggacgttttaatgtttttgtcatgatttctcctatttgcaatataaaagtttgacatttttccttctcattttatagtaaataaaggataaaatcaagcctagacggattgttttgacaattctaatcttttagactttgcataataactgttaaacagtcgaaaattatcccagttttaacaagtagtcaaaaagtctagaaaagtaaaaaccagtatcccaagatactgactcgtaaaaatacataaattagtccttagatgactactcccactctgttgctcctataatggaaaaggattgatacagtctagaatatcgcttttttatttattattctgatataaaactgttagaattgattttttgttttatacccaaatatgaatagagacgtagctaataagttgaataacatatttggaaaaatgagaaatagcaatattactagaacttttagaaacaatcaatatttaaaaagaaaaaagctcaaagaatttattaaaccatgttataatagatatagctataattttatttataacaagaggatagaaatgaccgaattagaaagaaaaaatcgaaaaattagctaagaaatattctgataacttaaacatcaaagttcaagagagagttcgtgaaatggcaaatgataataagagccattatttgatatacagagttttaggtatttcatttgaagaaggagaaaatatcgatttgtatcaaaataaaggtcgttttttatacaaatatgctggttcatttttagaagaagctgcagtactatgctttaacgaaaaatttggtacagaaaatacttaaaaagttaacattcctaattctgaaagtacaaaacctaagacttttgaaattgattgtttagtcggagaaaaacacgcatacgaaataaaatggtgggatgcaactacagatggagaccatataactaaagaacacactagaataaaagttattcataacaaaggatatataccaattcggttaatgttctactatccaaatagaactcaagctataaaaattcagcaaactttagaaacattgtataacggtattggagggaaatattattatggagattctgcctgggaacatttaagagcagtgaccggtattgatttacttagtattctaacagatattgcaaataaaaaaacaggggtaaaatcaaaatgacagtattaaaaggagataacttagaaatattaaaaactattgaatcctcaagtattgatttaatctatatggaccctcctttctttacacagaaaacccaaaaattatctaataacaaaaatattatgtattcattcgaagatacgtggacttcgattgaggattacaaagaatttttgtctgtaagattagaagaatgcaaaagagtgctaaaaaatagtggcagtattttcgttcattgtgataaaattgcaaatcatcatattagattaattttagataatatctttggagtagatatgtttcaaagcgaaattatatggaactataaacggtggtctaattcaaaaaagggattattgaacaatcatcaaaacatttacttttattcaaagtcaaaagattttaaatttaatacaatttttacagagtattcttctactacaaatatcgaccaaatactagtggaacgaaaacgagatggaaactctaaaactatatataaggttgataataatggtaactatattctagcaaaagagaaaaatggagttcccctttcagatgtttggaatataccatttcttaatccaaaagctaaagaaagagtaggttatcctacacaaaaacctattctgttattagaacaaattataaagattgctactgataaaaatgatatagttttagacccgttctgtggaagtggaactactttagtagcctccaagattttgaatagaaattatatggggattgatttatctgaggaagctatcaatataactcagcaacgtctggaaaatgttataaaaacaagttcaaatttattgaataaaggaatcgaagcatatagaaccaaaactgaggaagaggaaaacattcttaaattattacaggcaaaaattgttcaaagaaataaaggaattgatggttttttacctaaacattttcaaaaaaaaccgatacctataaaaattcaaaaaaataatgaatgtctgaatgagagtatctctttattacagaatgctataaactccaaaaaacttgattttggagtagttataaaaactcattcagataatttattatttgattttgatacgattcctgaaaatataatagtagttgaccattttgaacttacaatcgaaaaatggttaagtaaaagtcaacagttactatagtttgcaaattatttacagaaagaacaaaaaatgctctgaaacactgatttcaaagcattttttgttagtttaaaattactcccattcttcttttccaaacgtacaatatatccaaaaccattcaaaatactagattctattttttataatatcactaaatccacctaattataggacgttttcagatttttagtcccagtcccagtaccggagaaatattgttttaatataatatctctttttgtcttctaagctcttaaaagcaaaagaacaagtaaagagtcaagacaaggataaaaagtccatattagggcaaataaaaagctttaagacagatgacaaatctaagtcaaataagaaagaccatagcaaaggtgcagagagataaatattggcggtcttcggactgcctttatttttttatccatttttcaaatcaaatttattcagactatatatgcacatatacacttaaattcatataaaaacatggcttgtaaaaaattactttaatcacaataatcgcatttaaaattgtgatgtttgcaagctaaattacggacttcacttggaagttttcccttgtatcttttataatagatagaaaatttgctggcagatgaatatccaacagattctgctatctcttttataggtagttcagtgtttaaaagaagagtttcagctacattcattctttttctttgagtgtactctgtaatgctttgacaatatttttccttaaataaattttttaatttagtaccactcattttagatattttttcaagcgtgccttgatttacattcgttgcaaaatgatcatctaagaatcttgctacatcttcaagtgctttatcatcatcaatttcaattttatatttttttctatttaagtatgtgtcaattactatacttatccattcatttgcctttgctttaaagaaaaaatcagcggcaggagcgtccatcttacaatttaatatttccattgccactctttctaaggcctttgtaagtattatttgattcggttgaagcaaggttgaataaaaagattctggattaatgttaatagatgctaaatgtttttctattagctcttttttaaaaccaatggaaacagcaagataacaacaattctcgtgtaataaaaaaacaaaattatcttttatattatcaaaatcaaaagtacatagagagtttgcggtaatagtttgatacggattaaacttttctccgtttgcactgacaatgtaacttgaataaattgaaacatagtctgacatactataagtgctattttgaactacttcctctttgatataaaaatcatgtatatcgataatgaagctgcctccttcataaaaccaatatagtccttctgcataagttgaattctcttttttccaacaaaatgtatgacctgcacttgaatacttctcattgtttttacattcatctactttcatataatcttttacaaaatcataatatgacataacacactatcccttttagacaatattccaattagccttattaattcaaaactattgtattagtaattataacagatgtataatagaaaagcaatgatagatattatcaattaagcgaatttatatctaaaagggatattaaagaaaggagatatgcttatgaagatttacaaaaaactatttgcttatgtccaagataagaaatatcttggggttttggccataattttttctgctatatctgctgcacttacagtatatggatattatttaatctacaaatttctagataagttaataattaattcaaacttatccggtgcagagagtatagcattaaaatctgttattacactaacaagtggagcgatattttattttgtctcaggaatgttttcacatatcttgggattcaggcttgaaacaaatttaagaaaaaggggaatcgatggtctggaaaaagcaagttttaggttctttgacttaaatccatctggtcaaataagaaagattatagatgacaatgctgcacaaactcatcaggtggtagcacacatgattcccgatagttctcaggcaataatcacacccgtacttgtacttgcacttggctttatagtaagtataagagttggcataattttgcttgctcttactataattggtggcttaattttaggggcaatgatgggcgagcaagaatttatgaagatataccaagaatccctatctaaactaagtgctgaaactgttgagtacgtgagaggaatgcaagttgtaaaaatatttaaagcaaatgtagagtcttttaaaagcttttataaggcgataaaagattactcaaagtatgcttatgattattccctatcttgtaaaaggccttatgttttgtatcaatggttattttttggactgattgcaattttaattattcctatagtttattttatgactagcttagctagcgcaaaggtgattttacttgagcttatcatgattttatttttatcaggagttctctttgtttcattcatgagaatgatgtggtactccatgtatatttctcaaggaaattatgcagtagatactttagaggcgctttacgaagatatgcaaaaagacaaattagtgcatggtaatgtcaataattttaaaaactataatatagaatttgagaatgttagctttgcttataatgataaagctgtcattgaaaatttatcctttaatttagaagaaggaaagtcctacgcacttgtcggttcatctggatcaggcaaatcaacagtagcaaaacttatatcaggtttttacaatgttaataaaggaagcataaagataggcgggatagcaataagtgaatattctgacgaagccttaattaaagccatttcctttgtttttcaagattcaaaattattcaagaagagcatttatgataatgtagcgttagctaataaagatgcgacgaaagatgacgttatgagagccttaaaattagcaggatgcgatttaatattagacaaattcccagaaagagaaaatacaatcataggctcaaaaggtgtttatttatccggtggagaaaaacaaagaattgcaattgctagagcaattttaaaggattccaaaattattattatggatgaagcatcagcatctattgacccagataacgagtttgaattgcaaaaagcttttaaaaatcttatgaaggataaaacagttatcatgattgcacacaggctatctacaattaaagaccttgatgaaattattgtcatggatagtggaaaaattatagaaagagggtctgacaaagaattaatgtcaaaagatacaaggtataagagcctgcaagagatgtttaacagtgcgaatgaatggagggtttcaaatgaaagagttttataaaaaaagatttgctcttacagatggaggagcaagaaatttaagtaaagcaacactggcttcatttttcgtttattgtataaacatgcttcctgccatattacttatgatttttgctcaggaagttttggaaaatatgggcaaaagcaatggcttttatatagtattctcagttttgattttgatagcaatgtatattttgctttctatcgaatacgataaattatataacacaacctatcaagaaagtgcagatttaagaataaggacagcggagaatttatcaaaattacctctatcttacttttctaaacatgacatttccgacatttcacaaacaatcatggctgatattgaaggcatagagcatgcaatgagccactcaataccaaaggtgggcggcatggtactgtttttcccattaatatctgtaatgatgctagcgggcaatgtcaagatgggtttagctgtaattattccatctattttaagctttatatttatacctttatctaaaaaatatcaggttaatggacagaatagatattatgatgtcttaagaaaaaactcagaaagctttcaagaaaatatcgaaatgcaaatggagattaaagcatataatttatcgaaggatattaaagatgacttatataaaaaaatggaagatagtgagaaagtacacttaaaggcggaagtaactacaattttaactttgtctatatcttcaatatttagctttatatctcttgctgttgtgatatttgtcggcgtaaatctaattattaataaagagataaattctctctaccttataggatatttactagctgctatgaagataaaagactctttagatgcatctaaagagggcttgatggaaatattttatttatcgcccaaaatagaaagattaaaagaaattcaaaatcaagatttacaagaaggcgatgactatagcttaaaaaaatttgatattgatctaaaagatgttgagtttgcctacaataaagacgcaaaagttttaaatggtgtaagttttaaagctaagcagggagaggtcactgctttggtaggtgcaagtggctgcggtaaaacaactatcttgaaacttatatcaagactttatgattatgacaagggacaaatcttaatcgatggcaaagatataaaggaaatatcaacagaatccctttttgataaggtgtctattgttttccaagatgtggttctctttaatcaaagcgttatggaaaatattagaatcggtaagcaagatgcaagtgacgaagaggttaaaagagcagcaaaacttgcaaattgcacagattttatagaaaaaatggataaaggtttcgatacagttattggtgaaaacggagctgagctatcaggaggagaaagacaaagattatcaatagccagagccttcttaaaagatgcgccgatattgatcttagatgagataacagcaagccttgatgttaacaacgagaaaaagattcaagagtctttaaataatttagttaaagataaaactgttgtaatcatttcacatagaatgaaatccatagaaaatgcagacaagatagtagttcttcaaaacggaagagtagaaagcgaaggtaagcatgaagagcttttacaaaaatcaaaaatttacaaaaatttaatagaaaagacaaaaatggcagaagaatttatttattaggaggactacaatggataataaaaaattaaaagtaaaagatttagtaagcatcggtgtttttggcgtaatttattttgccttcatgtttggagttggtatgatgggcttgattccaatattgttcttaatatacccgacagtattagccatagttgcaggaactgttgttatgttatttatggctaaggttcaaaagccatgggcactatttatatttggtatgatatcaccacttgtgatgtttgcagctggtcatacctacgtagttgtggttttatcacttatagtaatgataatagcagaattaattagaaagattggtaattataattcatttaaatacaatatgctttcttatgcaatcttcagcacatggatatgtagctctttaatgcaaatgcttttagcaaaagaaaaatatatggagtggtctttgatgactatgggaaaagattatgttgatgtattagaaaagttaataacttatcctcacatggctttagtagccttaggtgctttcttaggaggaattcttggagcatatataggcaaggctctattgaaaaaacacttttcaaatggattatattgtgtgggatactttactccttgcctaattttatggtgctatctgaattaaaccctatagttaagatgtttttgagtatacctattgttattagaatgtttattttaccatttatggcagcaagctttatgataaagacctcggatgtaggcgcaataatttcatcgatggataagcttaagatttcaaagaatgtatccatacctattgcggttatgtttagattcttcccatcttttaaggaggagaagaaaaacatcaaaatggctatgagagtaagagggataaattttaaaaacccagtcaaatatcttgaatatgtttctgtgccactactcattatatcatctaatatatcagatgacattgcaaaagcggcagaaacaaaggcaatagaaaatccaattgccaagaccagatacattcgcgtaaagatacagctaattgattttgtttatgttttagcggttgctggacttattgtgggaggcttaatatggttgaaataaaaaatttaagtcttgattatggtgaagagcatatattagatgatatatcactatccatagccgagggagagtgcgtgctatttacaggaaaaagtggaaatggtaagtcatctttaataaattcaatcaatggactagctgtaaggtatgataacgcaaagacaaagggcgaaataattattgatggtaagaatataaaaaatttggaactttatcaaatctcaatgcttgtttcaactgtttttcaaaatcctaagacatatttttttaatgtcaatacgacattagaattattattttatttggaaaatatcggtcttgcaagagaagagatggacaggcgtttgaaggatatacttgagatattcccgataaaaaatcttttgaacagaaatatatttaatctatccggcggtgaaaaacaaattctttgcattgcagcttcttatatagcaggtacaaagattatagttatggatgagccttcatcgaatttagatattaaaagcataagtgttttggcaaagatgctaaagatattaaaagagaaaggcataagcataattgttgcagagcatagaatttattatttgatggacatagttgaccgtgtatttttaatagataaaggaaagcttaaaaaaacttatactagaagtgaatttttaaagctagataaaaatgaattaaatgctttaagtttaagagataaagaattaagtaaattaaaagttccttatttaaaagaaggtggagagtatcagataaaaaatcttagttacaaatttactgatgatgagtgtttaagcttaaaagatatttcgttcaagcttgggaaaatttatggcataataggatccaacggacgaggaaaatcaacgcttttaagatgtttaataggtcttgagaaaaaatcaaaagaagaaatttattttaagggagagaagctatctaaaaaagaaagactcaaaaactcttcacttgttatgcaagatgtaaatcatcaattattcacagatgaagtattcaacgagcttagattaggagtaaagaattttgatgaagaaaaggcgaaaatcattttaaaccccaattattcaccccaaatctaaaaaccatccagaatccttgccttagcttagatcctggatggtttcttttttcacccaatgggtgttttttactagacaaaaaagagtttcccctttatggtataagtgtagaaaaaaacacaaaaagaaaggaaactcacatgaacagtttaccaaatcatcacttccaaaacaagtctttttaccaactatctttcgatggaggtcatttaacccagtatggtggtcttatcttttttcaggaacttttttcccagttgaaactaaaagagcggatttctaagtatttagtaacgaatgaccaacgccgctactgtcgttattcggattcagatatccttgtccagttcctctttcaactgttaacaggttatggaacggactatgcttgtaaagaattgtcagctgatgcctactttccaaaattgttggaaggagggcagcttgcttcacagccaaccttatcccgttttctttccagaactgacgaggaaacagtccatagtttgcgatgcctcaaccttgaattggtcgaattctttttacagtttcaccagctaaaccaactcattgtagatatcgattctacccatttcacaacttatggcaagcaagaaggtgttgcttataacgcccactatcgtgctcatggctatcatcctctttatgctttcgaggggaagacaggttattgtttcaatgcccagcttcgtcctggtaatcgttattgttctgaagaggcagacagctttatcacacctgttttagaacggtttaatcaacttctctttcgaatggatagtggctttgcgaccccaaaattatacgatttaattgaaaaaacagggcaatactacctcataaaactcaagaaaaatactgttctgagccgtcttggagacctttccctcccttgcccacaggatgaggacttaaccatcttgccccactccgcctactcagaaactctctatcaagcaggatcttggtcgcacaagcgtcgtgtctgccagttctctgaacgaaaagaaggaaacttgttctacgatgttatttctctcgttacaaatatgacgagtggaacaagccaagaccagtttcagctttatcgtggacgtggtcaagccgagaatttcatcaaggagatgaaggagggattttttggcgataaaacggatagttcaaccttaatcaaaaacgaagttcgtatgatgatgagctgtatcgcctacaatctctatctttttctcaaacatctagctggaggtgacttccaaactttaacaatcaaacgcttccgccatctttttcttcacgtggtgggaaaatgtgttcgaacaggacgcaagcagctcctcaaattgtctagtctctatgcctattccgaattgttttcagcactttattctaggattagaaaagtcaacctgaatcttcctgttccttatgaaccacctagaagaaaagcgtcgttaatgatgcattaaagaacagtcgagatgaaaaaatcgtgtgacgaaccaagggaggagtctgcccttttgaggaaatctagcgaggaaaaacgatactggaacagcagaaagtaaaactgacctcatgaggaggaagaaagtggctcatgaggtcaggggttttgtaagttacatctagttgagagaggtatgaatgatttgggttaaaagatttatgcctggacgaatttattgaaaggcatccgatgagtttatcaggagggcaaaagcaaaggcttgcaatagcatctgttatgtgcaagaattctccatttgtcttttttgacgaaccttcaagtggtatggattattccaatatgataaaaatatctgaactgattaataagtataaaaccatggataaaataatttttattgtttcccatgatatagaatttttaaatgaagtggcagatgaaatttttgaattgtaaaatagagtctgttaaacatgtctatagaactagtaaattgtctaaaaatttaaaagatactaacacatattgatatttattagaaaattaacttcaggatttttacagtatttataaactttataatatgtatttatagtattaataatttccatatctttagggaaattatttatttacttaccataattaaagagatgagagataaatatcggcagtcttcggactgcctttatttttttacttaatttaatgcagtaaatcatacgattgaaaggaatctgcgttatatgctataattaggtagttaatctatacatttagaaaggtaaaatatagaattggagaataatatgggattttcatataataaattgtaaccgtccaataacgaagtctattgaaaaatctccagactagagaactcacggatagttcctaatctggagatttcttatttgcacttttcttgtacaactttagtccacggtaaataggcctctaaaacctctttgtttacgagagtttcctcgtttggaagacattctagaagataggatagatatttctcgctatttataatggattgaaataagatatgaacaaatcgattaggaaaggaaaattgatttatagaaatgttttagcagtcgatgcgtactgttatagattcaacgcactataattgatgacgtttagctgtttccaacaagctcataacaatagctcttgctttagctccttcaaaactttgagaaaataaccaccctcgcttttttaaactgagctcaggctaaaagagtccactggactcttttactccgtcccataaccaatgatttaatggcgcgttcagctagattattggaaaggaccagatgtccgtctttcaaaatagtcttaaaggtttcttcatacttgaggctgtattcaattgcccttcctagttttgaacctgctaaaactgactgacggcggcaccaagcaaagaagtcttccattaggggctggagatgttcttgacgtttctgtagtcgttcatcagctggcaaagcctcccagtctctttccaaggaaaataactgatcacaataagctaaacctttagctcctaaggatgatttatctgcttgcttggggggcacttcaaaaaacttccttctcacatgcgcccaacatccaacaagtgcagcttcttccagttgacgataagcttctagctgttcgcagtttaccaagcttagcgtcgccttactcctaaaccttggactgctatcgcataggcagaactagaggactaaagtcctaagttactgccgcaacatgtcacaatgaacatagccagaataatctcctaggaattcttgtactactaaaccactccgacgctgatcatggtggtacagcgtgattgcttgattctcagctttcccagacaaaaaagtccaatagtaaggcaactgactatcactctctagaacccgataagaggtttcatccgcatgaagaagagcttgttctaacaacttttctcgtaaaagattataaaggggctccaaatagtattgactcgccttgatatgccaattagcaatttccttacgtgtgattggtaaacccatcttagcccaatcttcttcttggcgataattgggtaccttcagattaaacttctgatggatggtgtgagcgataatagaagctgagccaaggctatgcgccaaaggggctttaggaataggagctttcacgattttatcactcggatttttatcactgcatgcttggcacttataagcgtgttggatatgatctattcgttttaattgcgcaggaataaagactaattcttgtcgttgaagggttgctccaatctcttttagatctccctgacaatcagggcaaatgctctcttctacttgatgatgaacttcttctgaatcaaattgggcaagaagagcttgacgtttccctttagctttcttacgtttataggtgatttcttctctttcaactgggtaagtcagagtcttcttccatattttgttcctcttcaaaaagactgagttgtccagatgggcaaacacttttctcagaggattttccatagagcttttgcgttagataagccacttgttcacgaagaagggcaagttcattggtgagactatcaattgtagcactctgttgttgaatgattttcaatcttcttccatgggcttcctctccttatttcctaactttattataactaaaaagaaagtcctcatttcaatagaaatcacgactttctgataaatttatttttggagtgatagaaaagcccttcataagccaatctacttgttcaggtgtgagagctttgacatccttttctgtactgggccaagtcagttttccgttctcaaagcgtttatatagtagccaaaatccttgaccatcccagtaaagggctttaaagcggtctttacgtccaccacaaaagagaaaaacttgaccggagaaaggatctaattcaaagtgggttttaaccagataagccaatgaatcaatgccttgcctcatatccgttttcccacatacgagatagacctgccctaggctagatagatgaattgtcatagagcaacactttatccaaaagctgttctaccatttcgagattgagagattgaaaaaaacttacttcaagcttgccaatacgaattttaagcagaatatcatttctctttttagaatcaaaacgacgagattgtggaatctctacaggaacaataggttgtggcattaaaatatcctccaatagttttactttactaatagtatacaggaggaactccatgaatgatagataccttgttatgacgcgattactatattagaaagttggctctctaattaaattaattcggttctataatatttgtagtgggtaaatccactatagatattatggagcctattttattgtagaaaaaaagtcccatatgacctataatgaaaagcgacaaaacaactcattagaaagaatcatatggaacaattacattttatcacaaaattactagacattaaagaccctaatatccagattttagacatcatcaataaggatacacacaaggaaatcatcgccaaactggactacgacgccccatcttgccctgagtgcggaaaccaattgaagaaatatgactttcaaaaaccttctaaaattccttatcttgaaacgactggtatgcctactagaattctccttagaaagcgtcgattcaagtgctatcactgttcaaaaatgatggtcgctgaaacttctatcgtcaagaagaatcaccaaatccctcgtatcatcaaccaaaaaattgctcaaaagttaattgaaaagatttctatgactgatattgcccatcagctttccatctcaacttcaactgttattcgtaagctcaatgactttcactttaaacatgatttttcttgtcttcctgagattatgtcttgggatgagtatgcttttacaaagggaaagatgagcttcattgcgcaagattttaacaatctcaatatcatcactgttcttgagggaagaacacaagctatcattcgaaatcactttcttaaatatgatagagccgtccgatgtcgcgtcaaaattattactatggatatgtttagtccttactatgacttagctagacaacttttcccatgtgctaaaatcgtgttggatcgctttcacattgtacaacatcttagccgtgctatgagtcgtgtgcgtgttcaaatcatgaatcaattggatcgaaagtctcatgaatacaaggctatcaagcgctactggaagctcatacaacaggatagtcgtaaactcagcgataaacatttttatcgccctacttttcgtatgcatttaaccaataaagagattttaaacaagcttttgagctattcacaagacttgaaacatcactatcagctctatcaactcttgctgtttcactttcagaataaggaaccggagaaatttttcggactcattgaggacaatctaaagcaggttcatcctctttttcagactgtctttaaaacctttctaaaggacaaagagaaaatcgtcaacgcccttcaactacactattctaacgccaaattggaagcgaccaataatctcatcaaacttatcaagcgcaatgcctttggttttcggaactttgaaaacttcaaaaaacggatttttatcgctctgaatatcaaaaaagaaaggacaaaatttgtcctttctcgagcttagctgacttcaacccactacagttgacaaagagccattaattctcattatatatatcaaaagaccgcagcttgaaaactacggtctaattttttgtccaaatgtaaaccacttggaactattattcaatttattctttttagcaaatgttcccgttttaatcccagttacagtttttaatcctctgtaaccgttgattttacaaagcttttaatttttttgcgattattcccactcaactgttgcaggtggtttacttgtaatatcgtagacgatacggttaacatgatccacttcatttacgatacgtactgagattttttgaagtacttcccatggaattttggcaaaatcagcagtcataccatcgatagaagtgatagcacggattgcaatcgtgtagtcatacgtacgaccgtcacccataacaccgactgaacgaacgcctgtgttaacagtgaagtattgccaaatatcgcggtcaagtccagctttagcgatttcttcacgaagaatagcgtctgattcacgaacggtttcaagtttctcttcagtgatttcacccatgacacggatagcaagtcctggtcctgggaatggttggcgccatacgatatggtctggcataccaagctctgtaccaagagcacgaacttcatccttgtaaagagtattgagtggttcaatcaattcaaactgcatatcttctggaagaccacccacgttgtggtgtgacttgatagtttgagctgtatccgtaccagactcgataacatctgtatataaagtaccttgagcaaggaatttcacatctttgagcttgcttgcttcgtcatcgaatacatagacaaactcgttaccgatgattttacgtttttgttcagggtcagaaacgccagcaagtttgtcaaggaaacgtttagcagcgtctgctttgacgatattcaaaccaaacttaccaccgagcatgtccataacttgatcagcttcgcctttacgaagaagaccgtggtctacgaagatacagatcaattgatcgccaatcgctttttggagaagaaccccaacgacagatgagtcaacaccacctgatagaccaagaaggacacgtttatcaccgacggtttcacgaatttttttgatctgcatgtcaatgaaattatccattgaccagtcacctttagccttacaaatgttaagggcaaagttacgaaggatatcatttccgtatacagaatgacgaacttctgggtggaattggataccgtaaatgtgtttatctgggttttcgatggctgcgtatgggcagtcagctgatgtacctgtacgaacaaagtcagcaggaatctcagtaaccgcatcaccatggctcatcaaaacagtctgttcatcaggtgttgattcaaaaagcgctgatggtgtgtgagttagggttgattgaccgtattcacgatttccagcatcacctgcaggaacaacttttcctccaagtttatgggtcaataactgcataccataacagattcccaaaattggaattccgagttcgaagatttctgggtcaatatcaaatgaaccatcttcatatacagaatttggaccacctgatagaataattcctacaggattgacttcacgaacttcagcagctgaaattttatggctttttagttctgaaaaaacaccaatctcacggatacggcgtgaaatcagctggttgtactggctaccatagtccaatacgatgattttttctacatcttgcaaatcagttgaaatgttgctcatctttttcctttctcaaaagaaatatcttttctcaatattctatcacaaataagggcgaattaccaactaaacaaggcgaagtttgactttttctagtttattggggtacaatagagaaaagatagaaatgaagtgaaaaatatgctacctgcttatataaaaatccatgatcagataaaaaaggatattgacgagtaccgttgggctattggtgagaggcttcccagtgaaagagatttagctgagcagtttgcggtcagtcgcatgaccctccgccaagccgtatctctattagtcgaagaaggcgtcttagagcgccgtgtaggaagcggcacctttgtttccagtactcgagtacaagaaaagatgcgagggacaaccagttttactgaaattgtcaaatcccaaggtaaagttccctctagccagctcatttcctacaaaaaaaccattcccaatgagcaagaagttgccaagctaggaatttttccaacggacaatattatccgaatggagcgggtccgctatgccgaccaagttcccctagtttatgaagttgcttctattcctgaaaaattcattaaggactttaaaaaagaagaaatcaccagtcatttcttccaaaccttgcaaaaacatggctatcgtatcggcaaatctcaacagaccatctatgctcgccttgctaaagaaaagattgcccactatttggaagttgaaaaaggacatgctattcttggattgacccaggtttcctacctagaagatggtactgcttttgaatacgtaaaaagtcaatatgtaggcgaacgctttgaattttatcttgaaaataattagattaccacgcaaaaactctctgtcacggacaaagagtcttttttatttttctaagaataaatctttcaaagaaatcaaagttacagcaaacaatatcattgccataccaagaaaatcaatgggataaaattgttcattcattattaagaaggcaaagaaaatcgccgatattggctcaattgaagccaacaagcttgacttgaccggtcctatcagactggctcctttaaggaaagctgtataggcaaagacagtcccgataaggataatgcctgcaaacgcaaggagaaaatcaagactagtcgggatatcggcctgtagaacccctgtaaaaggaagggcgaccaaacctgctatgaccattcccacaccaatgaccaagctgctcccccactttttaatcaaggctatgggtaaaatgatatacagagcataagtcaaggcagaaaagagaccccagaacagaccagcaggtgtcatggataactggtccaactgcccatgtgttgcgatcaggaaggttcctccgatggcgaatatgatggaaactatctctcccagtgtcggtgccaccctatccttgatacagctataaattaaaattccgacaggacaaacatactgaagcaccgtcgctgttcccgcattggtctcctgaatagcagacagataggcgaattggttgagaaaaagaccaatcagagcaaaaataagaagagacagcaaactctttctatcctttaaaaagaccagtattttatcctttgcagtagcataagccaagagcatgagaattccaccagcgattaaaagacgcaagttagtcaagaccagagccgaaattccgtgtgccattaggtattggccactcgttcctgacaacccccaagcaataccagccacaactgttagtaaagtcccttttaaactatttgacatgtctctccttactcttctttgcgaatcaagttcatcacttgattgcggtctaatatccattgagctctctcgtccttttcataggtacgattcgataggaaaatagtggcttcttgcttctgacgattccacatgataaaggtacctgtatagcccgtatggtctagccaatctccttccaaattccatgctaaagaacgttccttgtcatccaaaggagaaaaattttgatttaagtctcttgcaaaatcatctgctaaatagtgttctaaaaagatttgtaaatcctttatagtcgaaaataaaccagcactcccagcatgtctacccaggagacgagccttgggatcatgcactatgcctgcctctacacctctaactgttggaacagcaagctcaactggcccaaacttagtttccgtcattccccaaggtttccagacttgatcctttaaaatcacatccaaatcttgattaaaaattctttccaaaataaagcccaacagcaaaaaatggacatccgaataaagaaaggctggctgacttcgtctgttgagatgaaacatcgcttcctttaattcaggggctgttaaaagatcacgattaggaataaaaggatcaaggtctgttgcatgagtcaagagctggcgaatagtgatgtctggataatcactctcaggtaaaaaatctattaccagtctatcaatatctaattgacctatttcccacaagaaggtacaaactgtgccaaccccaacaaccttgctgacactagctaggtcataaactagtcctgcctcagtctgcaagccatgctctgggtcactctggcctaaatagaactctgtccattgattgtccttaaaatacgcaaaagaggctccgggataaatccctgcctcgatttgttcttctatttttttaataatcttggtccacttcatacttcttcaaaccacaattcaacattatttctatctttaccaaggaagaatttttcagacttaggaataaaatattcagtagactcaaacttctggcgaagacttgctatgtctaattcattgaccaagaacttgagcatagataagtcccaggtaaccgtattgtccacagtcaaatcctgcccctgagctggaataaaatcaagggatgccccaatttcagatgattccaagaaactttcgatatcagttgggagatgtaattccatagaaatctcaaatttacttaaagaaattgatgccaaatctgtttgaaattcaggcttttctcctacttctactagacttgctatgtcatcttccgcatgaatcaaaatcaaatcatcttctggtgagaaaatttcaaaagcgtagccattttgacctttatataatcgatgaatcgaatctgttttagataagattccttcaatttctaagggattttccaccttgacaatcaatctagctagtttttttcttccctctaccttacgagtacgcatactgggagcttcttctaaaaccagcttttcaagacccgtttggtcacctagtgacagaaaggccgattcttctaacaaggccttcattccaagggtttcaatataaaatgtttcatttaattttctattattagcttttaaagtaggaataatccgtacaatctgatttacattcataaattcctccgtcactttttattttaaaggattttagaattttttacaagatattatgctcaaatttaacattatttagctatttagtaaagatagtctttcaaggattttgacaaagcctgataaccagcaatactgaggtgcagtccatcagttgtatattcttttttgagttggcctgcttggtctgtcaaacaatcaaatactggcacaaattccacctgcatataggcagatgcaagctcttgataggcttgattccagttctgaattttttcattcgagcggatatagactgcctgctggtactcctctctctcattgacaggcaaaatggaaagcaatttaatctctgtcaatggataatcgcgagcaacggattgaatgatagcttcgagattattgagagcctcattcacaggaacatcctttccgatatcatttgtcccaatcagaagaaaaattttatctactgctccaccatatagatgagcatcaaggttctctagtaacagtcctgtctgatagccacgaattcctcgattgacaatcgtctttgaagtcccaaatagctcctgtagaggataatactcgacaatggaatccccaataaaaagaatgtttggttctacaacagaaatgtgatttaggtgacgatacttagtttgaattttttcttgttcctttaggagccaattttctaataactgtactgccacttcattctcctttttctaaccagttttccaagacttgataaactcctccttggctgttggctggtgctagagcagtcgccacagctttggctttctcatcagcattttccatcgcataggcaattccagccatttcaagcatttcaacatcattttcactatcaccaaaagccatgatttcttgggatttcaagtcccagcgcttgagtaattcctccaagccccatgctttatgaatcccagcttggaggatatcaatgcaaccatagccactggatacagctcggacacggccatcaaagagagcattgatttcttccaaaaccgaactcaaacgttcctcaccaacaaccatgctcatcttgagcacaccaccaaagaggtcagatgttaattcatccacaaattgcatccgttggtagaatttttcaatcatttctggagtcataaaactttcaagatctgtaaaaatcgtaccttccttgacaaaatcacccttcatccccgttacaacaaactggtcctgacacgctcgacccttgaaatgagtcaaagccttgttgacaatggcgtcatcccatgtctgagcctgaatcaattcattgttttcaaaaatacgagcgccattagcaacaaccagaaccactcgatccaccaagggactcagtagttgtctcatgcggtgaatttcattgcccgtcgcaatgacaaaacgaatgcccctttgatccaactgatctaaaatcttttccaatcgtgggagatcaagctgacctctagcatccagcaaggtcccatccatatctgtcgcaattaccttaatcatcatttactttcctctggattcaagctaataccacttcaatcccacatgttcattcatttctttataggctgtatcaattcgttccttagtcgcttcatctaactggtcacgatgactgccatcctctataaaatcttccaaaatataagtttggtaatgatacaagggatatccttctggtgaaaaggttccctttggtgttcgattgacccaagtaggatgagctttagctgttccgatagttgtttttccatccttcttcttgatggtgacatccatgagaacaccacgttcagtccacttagcattctcttcatctcccatagattcaattcgttgattggaaatgaagttccccatttaatagataatgagtttcttatctccatctttttcaaccgtttcagatggttcaacaacgtgaggatgccctccaaagataatatccgctcccaaatcgatcatcttgtgataaagagctttttgttcttcagttggttccaatcgatactcaacacccatctgaagcatgataatggtgatatctgcttccttctctgcccgttcaatttcaaccttcatcttatcttcgtttaaatctgaaagataacgattatagtcttcctgagaaatatactgctcaattccattgaaaccataggaataggctaacaatgcaaccttgataccattcacttccttaatgaccagcggagcctgatcacgtggttcgtgcgtataaactccgattggagtgattccagctttctcaataatatcggccgttgaaataactccctcaatttgcgaatccaaaatatgattatgagctaaatccagcacatgataacctgcctccttaatagcatccataacttcaacaggagcattaaagagaagataacccgctaaataatgatccttattaatggttccttcaaaatcaccaatagctaaatctgctgcttagtccccttgcttgagccaaggagtcacatactcaaaattttcatgaaagtcataggtaccgtcttcttttttagctgaaaagaaaagtccatcgtggtagagcaaatccccgtgggccataattctggcagttttttcctcttcctactcctgagacttttgcttagtcccctcttgagaaatagtatctcgtttttgactagtcaagggattccttggaagctttcaaacaacaagaccaagcccattgataaaccaactgctagcaagagtatcgccacaaatcccttattgctccacttgcgataactcctaaaaagtttaccaagcccttcataaaacgaaaagctaaaccaccctgatttcgattttgtcttctttgtatcttcgttctccctactttcttatgcaagccttttctttttattatatcacagataagtatttctttcacaattgaattgaacttcctatctattttctataaatcctaaatgccataatgctttcaattcttgtcattttgtgatatcatgtagaggtaatgaaagaaaatgaactaatccacagtggcttattccaagtataccacttgggctttggcagtagctaactgcactaaacataatataaggagagaaaatgtctgcaatagaacgtattacaaaagctgctcacttaattgatatgaacgatattatccgtgaagggaatcctactctacgcgcgattgctgaggaagtcactttccccctatctgaccaggaaatcatcctaggcgaaaagatgatgcaattccttaaacattcccaagatcctgtcatggctgaaaaaatgggactccgcggtggtgttggactggctgctccccagttagatatctcaaaacgcattatcgctgttttggtacctaatattgttgaagaaggcgaaactccacaggaagcctacgatttggaagccattatgtacaatccaaaaatcgtctctcactctgttcaagatgctgctcttggcgaaggagaaggttgcctgtctgttgaccgtaacgtgcctggctatgttgttcgccatgcccgcgttactgttgactactttgacaaagatggagaaaaacaccgtatcaaactcaaaggctacaactccattgttgttcagcatgaaattgaccacattaacggtatcatgttttacgatcgcatcaatgaaaaagacccatttgcagttaaagatggtttactgattcttgaataaagaaaatcccgttgcaagacggggttttgtgttataatagaggcatgaaaacaaatgatattgtctatggtgtccacgccgttaccgaagccctccttgcaaatacaggaaacaaactctacctccaagaagatctccgaggtaagaatgttgagaaagtcaaggaactagctacagaaaagaaggtgtccatttcttggacatcaaaaaaatctctctctgagattactgaaggtgctgttcatcaaggttttgttctacgagtgtctgaatttgcctatagcgagctagattacatccttgcaaaaacacgccaagaagaaaatccacttctattgattctagatggtctaaccgatccccataatctgggttctatcttgcgaacagccgatgcgaccaatgtttcaggtgtcatcattcccaagcaccgtactgtcggagtaactcctgtcgttgccaaaacagccacaggtgctattgaacacgttccaattgcccgagtgaccaacctcagtcaaaccttaggataaacttaaggatgaaggtttctggacctttggaacggatatgaacggtactccttgccacaagtggaatacaaaagggaaaatcgccctcatcattggaaatgaaggaaaaggtatctctagcaacatcaaaaaacaggtcgatgaaatgattaccattccgatgaatggacatgttcaaagccttaatgccagtgttgctgcggccattctcatgtacgaagttttccgaaatagactataaaaaagtttccagtcatctgattggaaacttttttatgattaactatgttctgtaatgaatttataggcttcttgaccagcgatagctccatctccaaccgctgttgttacttggcgaaggtctttcaagcgaacatctccaactgcaaagataccgtcgactgcagttttcatgtggttatctgtcacaatccatcctgcctgatcttggatattcaattctttaacaaaatcgctaagagggtccaaaccaacatagataaagacaccaccgaaggcttgttctgtcacttgacctgttttcacattttcaaatacgactgattctactcggttttcacccttgatttcccttactacagaatcccagataaagctgattttttcattcgcaaaggcgcgatcttgtaaaaccttttgggcacgaagttggtcacgacggtgaacaatggtaacagtcttagcaaaacgagtcaagaagagggcttcttcaacagctgaatctccaccaccaactaccaataaatcttggtcacggaagaaagcaccatcacacacagcacagtaagaaacaccacgactgttcagttcttcttctccaggcactcccaaaggacggtgtttagaaccagttgctacgataactgtacgtgtttcatatgtttggtcatcagtcatcactttcttaaaatcaccatggtcttcgacattttcaacataaccataaatgtgctcaacaccaagattttcaagtggttcaaacatcttttcagccaattcaggtccactaatattagcgtatcctgggtaattttcgatatcagatgtattattcatctgaccacctggcagaccaccttcaatcaaagctacttttagattgcttcgagcagcatacaaggccgcagtcatccctgcaggtccagcaccgataataatagtatcgtacatatagattccttctttcttgttgtaactatctttattctaactctttcttgtcaatcacgcaaggattatgccttgaaaacaagaattaaactcataaccgcaaaggataatactgggacaaccaagactccaatcataatcatatcatagagatgggcttggcgagccctggctgtcttatcaactcccgacatggctctcagaccaatccaaatccctaaaaaaatcagaacaaggatggtggtcaagatcaaactctcgaaatataaagaaaatagttgcagtagcatgatttctctcatttctatcttttttaaagagtaaactcagctagtccaactaactgagttttcctttatctattatatcaaatataagtccgtttgtaactagcgaagaattcttttgtccgctcttctttaggggtgtggataatctcatccggagttccagactcgatgattttccccttatctaagaagagaattttatccgcaacttgggctacaaaggacatgtcatgactgaccaaaatcatggtctgacctgacttagcagcatctgcaatagacttttctacttcaccgaccaattctgggtcaagggctgaagttggttcgtctaagagcaaaacatctggtttcatagcaagcgcacgcgctagggcaacccgttgcttctgtccacctgataaatggcgaggataatggttttcacggtccgaaagcccaaccttagccaactcttccttggcaatcttagtcgcttcttggtcagataatttcttgacaacaaccaagccttctttcacattatcaagtgctgttcggcgttcaaacaaattaaactgttggaaaaccatagacaacttacgacgtagggcaaggatttcttcttgagtgattttagaaaaatcaactgaaaaaccatcaatctgaatagagccactgtcaggtgtttcaagataattgagactgcgaagaaaggttgattttccagctcctgaagaaccaatcaaggctacaacttcccctttttgaatatccaagtccagatgatccaagacagtctgtcctgaaaaggatttgcttaaattcgaaatcttaatcattaacgaaggtctcctttcacatctgtttgcactgtatcaggtgcagaaatagccatttttctctcgatgaaacgaccgaggctttcaattccgatattgactacccaataaacaagggcaacggagatgaagcgttcaaaatagcgataatcagctccacctagaatctgagcttgggcaaagacttccacaacacccgcactaaaagctagagatgttcccttggtcaaaccgatgagggaattaatcaaggttggagtagctaccaccgctgcattaggaataatcactcgtcgataaacttgcgctcgggtcatacccagactgcgtgccgcctcaatctcaccaggattaactgagagaatggctgcacgaatggtttcactagcataagctgcctcattaaaggcaaaggcgacaatcgcaaaagctgcagctggaatcgcattgatattgagaccagttccccattgctgattgagggctttcaaagccaaagggattccgtagtaggtcaacatgagttgcaccaaaatcggtgtcccttttaagaaactaacaaagaaggcctgcaagggatataaaatcttgacacgattgatcttcacaatggcaaaaagaagcgccaaaaccaagccaaaaagggcaccaccaattgtcaacataattgttgttggaagttgttggacaattctagggattccatcaaagaccgaacgtaggctaaacagcttgccatccggaatcaattgcatcaagttttggtaccaatctgatgctaaaatcgttgtaacattcataaaaacatcctcttctgataatgattcattctaccatgcttctgccgtcaatgaaattatttgctacggtcagatacagactttgtctacctactagtttatcatactttgaaacagggaagttatatattttatctatcaaagagatagataaaaactatttcagtcccagttcctcataagattttcgataaccgatttgcttaacagttccattttctactaaaatgggccgttttaacaacataccgtcacttgctagcaactcagccgcttcttggtttgacaaacttcctaccttatcttttagccctaattcacggtatttgataccactggtgttgaaaaattgcttcaattcaaatcctgaggtttctagccaattcaaaatgacttcttggctaggtgtttcttccacgatatggacggctttatagtccacacctaattgatttaattcttgttttgcttttttacaagttgaacatttggggtattcgataaattctaacatgtgcttctccttctattgcttctatctttaaaatctactccttcatgctccaagagccaagctttcttttccactcctgcagcataacctgtcagacgcttgcctgctcccaacacacgatgacaaggtactaggatagaccaaggattgcgtcccactgctccaccaattgcttgagcagaagccacttgcaggtcttgagcaatttgtccataggtcactgtctgaccataaggaatgccctgtaaatagtcccaaactctcttttcaaaattcgttccgattggcgccaagagcaagttggataaatcctgaggcttgcctttaaagtaatcatctaagcaagcaataactgggtctaaaataggatgactaacaacttcttctatcgtttcatctcctagtcccctctcaaaatgcttctgctcctgaacccaaattccatacaaataatggtcatcagctacaagtgatagaataccaattggtgaggagtagaggatttttacatacttcttttgcattatttctttaatttttgataggccaagcgttcgccatctactggcatcttaccgacttgtttaaaaccaagtttttcaaaaatatgttgcataaccttgttttcagcatgcgtatctgagcgaaaatcaagataatcaaaaccttcaatcaagccctctaagaaggtttgagcaactccttttccctgcacatctgctgccacagcaatacggtgaaagactagatactctgactctccagcttgccagtttccctcataaatagcttcataggcctcctctggactcttggtcacagcagcataggctagcagttctccctcttccaaggctacgtaggcttgccctgagatgatatcatcgataataacatctgcatttggatagccattttgccactggtcactaccagcatctgctaaacattttttggcatcctccatcacctgcatgatggcatctacttcatttggaaaagctaaacgaatttccatcttttttcctcatttctgactagtttctcccatcatagcataatttaagtatttctacaagcagttaaaacttgactttgtgtttttgttattttataatctagttatcaaaactatataaaaaggagttaaaaatgaaaactaccttttcctacccaaaatgggcagaaattccaaacattgacctctatctggaccaggttttgctctatgtcaatcaggtctgcgcccctatctctcctaataaagacaagggcctaacagcatctatggtcaacaattatgtgaaaaatggttacctgacaaagcctgacaaaaaaaaataccaacgccaacagattgcccgtttgattgctatcacaaccctcaagtctgtattttctattcaagaaatagcccagacacttaatactctacaaactcaagcaagttcagaccaactctacgatgcttttgtggactacatgaaccaaggaattgacccagctaaccctattatccaaaccagctgccaaaccgttaaactctatcatcaaactctagacttaatcgatcatactcaagaggaggtaatccaatgaacactagtcttaaactcagcaaacaactcagttttggagaggagattgctaatagcgtgacccatgctgtgggtgcagtcatcatgcttatcttgctgcctatttcatccatctatagttatgaagcacacggatttttatcctctatcggcgtttccattttcgtcatcagtctctttctcatgttcctatcatccaccatttatcactctatggcctatggttcgacccacaaatatgttttgcgaatcattgaccattctatgatttacgttgccattgccggctcatacacgcccgttgtcttgaccttgatgaataactggtttggctatctgattattgtcatccaatggggaacgaccatctttggtattctctataaaatctttgctaaaaaggtcaatgagaaatttagccttgctctttacctgattatgggctggttggttctggctatcattcctgccattatcagtcaaacgacacccgttttctggagtctcatggtaactggcggactctgttatacagttggagctggattttatgccaagaaaaaaccttatttccacatgatttggcatctctttatcctagctgcgtccgcacttcaatacatcgctattgtttattacatgtaaaaaagttgagaaattcaatctcaacttttttctttacacatattgataaagtactggtgcaagcgcacatcatcagtcaattctggatgaaaagaacttaccaacatatttttttcttgggctgcaacaatttgattgttcactgttgctaaaatttctacaccctcaccaacactactgataatcggaccacggataaaggtcattggaatcttgccaactcccttacattctgcttccgtgtagaaacttcctaattggcgcccataagcattacgctcgaccaccatatccatagttcctagatgactctctttctgagaagtgatttccttagccagcaaaattaagcccgcacaggtcccaaacactggtaagccagatagaatggcttctcggatgggaagtagcatgttctggtcacgtaagagcttgcccatggttgtagactcaccaccaggcaaaatcaaacccgacaagtcactctgatcttgctgaaaatcatctagatttctgagttctacactctcgacacctaattgatctagcacttttgcatgttctgcaaaggccccttgcaaggccaatattccgattttcatctattttcctcgttcagccatgagaatttggatttcattttcattaataccaaccatggcttctcctaaatcttcagagatttgagctaggatttgaggattacggaagttagtcacagccttaacaatggcactcgctcgtttaacaggatctcctgacttgaaaatacctgaaccgacaaagaccccctctgcccctaattgcatcattaacgcagcatctgctggcgttgcaacacctccagcagcgaaatttacaactggcaattttccatgttcatgaacatattggaccaattctacagggacttgcaaatccttggcagcaacataaagctcgtcctcacgtaagttttgaatgcggcgaatttcctgattcatcatacgcatatgacgaacagcttggacgatatcccctgtccctggttctcctttggtacgaatcatggaagcaccttcagcgatacgacgcaaggcttcacccaaatccttagcaccacagacaaaaggaacttggaattctttcttgtccacatggaaacggtcatcagctggagatagaacttcactctcgtcgatataatcaatttcaatagcctctaaaatctgagcttcaacaaaatgcccgattctgaccttagccattactggaatactaaccgcttcttggatttccttaatcatctttgggtcgctcatgcgggaaactcctccagctgcacgaatatcagccggaattcgttccaaggccatcacagctgccgcaccagcagcttctgcgatacgagcctgttcaggattctgcacatccataataacaccacccttgagcatctgtgccaagtttttatttagttcataacgattttcagtcatttgttttatcctcatcatttgtattggtagctaccttttcattttaagtcagaacagaatgaagcacaagataaaaaaactataattgtatggggacaaattagctaaaaactatctgaccttaacttaaggccagatagctcattcatttttatttttcagccgtaagggcagccattgtgatgtagttgtatggtttgttgaagtgtggcaagaagaagaggtctgtcaatgccaatttatcaattgtcacatgctcttggatagcaagtgagaacatgtggattcccatgctaattgcaatatcatgtgaaaccatttgggcaccaagaatttcacggctatctttgtcaaagacaatcttaattgctacttcatggttgtcatgtttcatgaattctggtttttgaagatcgttaaagcctgtttcagttgcgttgtaaccagcagctttcgctttttcaagagtcaaaccagttgaaaccatgtgaagaccgtagattgagataccatttgaaccttgaacaccgattccttccaattcatgtccacaagcattgtaggcaccaacgataccagtgcgaacagcatttgaagcaagagcgatatagcttgtatctttacgagcattgtcataaacagtcgcacagtcaccaacagcgtaaacgtctgggatagatgtttcttgtttcttgtctacaaggaaggcaccgttgcggaagagttcgatcttaccacctgcaagggctgtgtttggacggaaaccaactgcaaggataaccatatccacgtcaaagctttctttgtcagtaatcaagcgttcaactttaccgtcaccttcgattgctttaacagtttgacctagagccaagcggatgttgtgatcttccaagttcttcgccatcatttgtgtgaagtctttgtcatagtaaccgttcaagacagtatcaacgatatcaacaaggacaacttcttttccaagacgttcaaaggcttcagcaagttcaacaccgatgtaaccaccaccaacaacggcgatacggtcgaggtgttggctcttgtcagaaagtttattgataacttcttcagcattttggtacaatttcacgaattgtacgttttcaagagttgctttaaattcgcggtttcctttaacaatttcaacaccttcgattggtggcaagattggtgtagagcctgtagcgaaaatcaatttttcgtatgattctttgtgctcttttccttcaacttccgctgtaactactttgttatcatagtcgattgaaagaacaggtgagttcatgtaaactttagcacctttagcttccaatttttctttatcagaatagaacaagccttcagcaccgtcaatttgttcaccaatccaaagagccattccacatcctaggaaagagatgttagagttttggtcaaatacaacaatttcgttctcatttccaaaattatccaacatggtattgatacatgctgtaccagcgtggttagcaccgactacaacgattttactcataaaaatttcctgccttcattctaaatttaccttactagtataccatttaccgttagcgtttacaaggggggtactattatttcagcattttttatcaaaaataattccccatttatcctgttttcaagcctgatgaattttatgagcatatttcttgactttttccaaattttgtttgtgaaaattctaactttatggtattataataacatgaaaatgaaatgtaagggcttcaatttagatgattatttgatattacaacttattttctataagagaaaggagttggtagcttgactcttcgttcacattctgaacggctaatggggactactatcactatttcattagtggatgagcaagccgatatctttctccaaaaatcctttgacttgctcaaagaacttgaataccgcttcaacgccaatagtcaagaatctgagttgatggaaatcaattatcaagcaggaatagcccccgtcacggttcatccagacctgtttgagctgatttcacttgggttagagcatagcctagcgctctctagccacctcaatatcagcattggtcccttaattcaaacctggcgtatcggtttttcagatgccaaggtcgcccagcctcaagaaattgaatcggtgctgcctctaatcaatcctcatggtatcgagttagattcttctacttctactgtgtttttaaaacagaaaggaatgaagatcgatctaggttgtttagccaaaggatacagtgcggataaggttgcccaatttcttaggaaagagggggtgacttctgccttgatcaatctgggagggaatatcctgaccattggaaaaaatcaggcaagaggggataacccatggcaaatcgggattcaagacccagccaatcctaggggaaatcatttaatgaccatccctgttgtcaataaatctgtcgtgacttcaggcatttatgaacgtcacctgaccgtcgatggacaagattaccatcacatttttgacagtcaaacaggatatcctgttgaaacggaactagcgagtctaacaatcatctctgataaatcagtcgatggcgaaatctggacgactcgactctttggagaaagacctgcttctatcctctggcaagtcgaaagtttggagggcatcgaagtcatcctcatcgataaagaaggccacctaagctgttcttcaggaattcctactctatagagacaactgtttcaatggaattttaaaattgtattatgtaaaaagagaaaggaaatctcatgttaaaacttattgctattgttggaacaaattcaaaacgttctacaaaccgtcaattgcttcaatacatgcaaaaacactttactgacaaagctgaaattgaacttgttgaaatcaaggccattcctgtcttcaacaaaccagctgacaagcaagtacctgctgaaatattggaaattgctgctaaaatcgaagaggcagatggcgttattatcggtactcctgagtatgatcactctattccagctgttttgatgagcgctcttgcttggttgtcttatggtatttacccacttttgaacaaaccaatcatgattacaggtgcttcttacggtacgcttggttcatctcgtgcccaattgcaacttcgtcaaatcttgaatgctcctgaaatcaaggcaaatgttcttccagatgaattcttgctctcacactctcttcaagcatttaacccaagtggcgacttggttgaccttgatgttatcaagaaattggatgccatctttgatgacttccgtatctttgtaaaaatcacagaaaaattacgtaatgcacaagaattacttcgcaaagatgctgaagactttgactgggaaaatttgtaagataggagaccaaaaagaatgaaatttgttggacttgttggatcaaactacgatcaatcatataaccgtaagctcttggaatttatccgtcgctacttcaaactcaaatttgaattagaagttcttgaaattgacgaagttccaatgtttaaccaagatgaaaaatgggatgaaagtttccaattacgttatttatataacaaaattactcgtgcagatggtgttatcattgctactcctgagcataaccacactatctcagcttcactcaaatctgtacttgaatggctttcatacgaagttcatccatttgaaaacaagcctgttatgattgtgggtgcatcatactatgaccaaggaacatcacgtgctcaagttcaccttcgtaaaatccttgatgctccaggtgttaatgcctacacgcttccaggtaacgaattccttcttggtaaagctaaggaagcttttgataacaacggaaatatcaccaacgaaggcactgttaaattccttgaaacttgcttagataactttgttaaatacgtaggagtcgtttcgaaattgaaaaaaccaaaaccaatcgaatcagaagacttggattgtggaaaaccaatcgctacaaccatcacagaagttgaccctgacgatccagaatgggtagaaaaagttgcagcattcactggtgctgtttctggtgatacctatgtcaaattggaccacggtatcctaacagttaaccaaattgatatgttcttgaaagctatgccatttgaattgacatacgctgacgacaacaaccaattcctctactacaacaacgctcaccaagatccagacactatgttcgctaaacgtgtaccacctcaatcaggtagccgtatgtcgactgttcatggttctcttccaccagcacgtatgaagaacgtagagtgggttatcggaacacttcgcaacggaaaccaagaatacgtccgtacgatcgttccaggttctcctgcaggtgttatcaacactcacaactaccaagcaatgtactatcctgatggatcatacgctggtatcaatgaaatcgtctttaacttccaaccatggcttgactggtacctaaaagagactggtcaacgtttggtgggtggtagcggaccatttgctcctgctgccggaggtcatggagacgccgatgctacttctggcgcttctgattcaggggatgctggaggccacggtggtgacgcagacgctacagccggtgcaagttactaatgatagtttttaggaaccattatggttccttttttagcgaaaaaagactagcaaacacaaactgctagtctctttgttatcgtttcatctatctttgttaaaagaaagaatacatatactcaatgaaaatcaaagagcaaactaggaagctagccgcaggctgtacttaagtacggcaaggtgaagctgacgtggtttgaatttgattttcgaagagtattattatgaatttggatcatcaagactacggccatgtaatcctttttcacgttgtacttggcgtagtttttctggtgtaacatcgtttccttcttcgtccacaattttgattccttcaatgtggtgacgaacagcgcggcgataaccttcgatgtactcctcacgtagtttggcttgttccactttttcttctggtgttaagccttctgtttttttctttttagcaagctcattgatacgagcaatttttttcggatccatttcttctcctttgtaataagataaagtccgtttatcaaattttatttagtgttaatttggttaaaacaagcaaacttagctgctttcttggttagttgtgacaagattgccaaacgattttgacggacagcctgatcttcagccattaccatagtattttcaaagaaagcatcaatgactgggctaagcgcaaaaagttgtttcaattgctgacttgcaggtcctgataaaatgagtgtttctactgcttctgccaaagctttttcttggtcattctcaaatagtgctgaatcaaccgtagcaaccccttctgccttctcggccaggttaaaggcacgagaaagtgattcaacagatggtttaaaatcttcttccttgcttacttctacgagagcacttgctgcttccaacatatctgccacaacaaagtttgaacctgcaagaactgcttccttgatatcttttggagtagagcccatcatcttatcaacacgagccttgataaagtccataacctctgctttattttcataagtcaaactgtcaaatttcaatgcataaaggctatcaatcagctcatccatagcaatgtgccaaccaaaggcatccaagatacgaaccacaccttgagttgcacgacgaagggcataagggtcattagaacctgatggaatcaatcctactgagaagaaactcaaaatcgtatccaatttgtctgcaatggctagaactgcgccgaccttgctctctggaagttctccttcagctgatgtaggcatgtagtgttcacgaatagcagctgccaccgctggagtttcaccagcaagaagggtgtatttttcacccataattccttggagttcgtcaaattcaccaaccatacctgtcaacaagtcaaacttgtaaatggctgctgcacgagcaaggtcaactgtttcatccactgacaaactagctttttctgccaaaagtacagtgatttgacccgtacgaatcatgtgttcacgaagagaaccaatcttctcatggaaggtgacattgtttaatttttcaacaagatctgaaatcaccaatttttggtcttcacgccagaagaattctccgtcttccaagcgggctaccaagactttttcatttcctttgatgacatttttcaaacgctctgcgtttccgttacgaacagaaatgaagtttggcaagagttttccatcttgatcacgaacaacaaagtaacgctggtgttccttcatagaagtcaccaagacttcttctggaacttcaaggtatttagcatcaaaacttcccatgaaggcagttgggtattcaaccaaattcaagacttcattcagcaaatccgcatcaatttcgatacgtacaccatgttttgcctcaatttccttgatttggtcaacaatcatttgctcacgttcacatggatctgcgattacaaactgcttacgaaggtcttcttcatagctcaatgctgactgaatcttggtttcttgtcccaaaaaacgatggccacgactcacacgacttcccttgatatcaaggaaatccaagtcaaactcttgctcatccaagagaacagttaaagtgtgaacagggcggatgtattcaaagctatttcccgcccagtgcatgctgacagggaaagtcagtgacttcaagacatccacaatgcctggaacaatggcttcaactgcttgaccaatttcttccttagtgacatagacatattcttcacccttgatttcacggaattcgatatcttcaacagtcaaacctttcccacggacaaatccttgagctgctttggtgaagtttccatcactatctaaggcaattttctttgctggacccttgaaatcttctgttaaatcagactgtttgtctgcaagaccagttacacgaacagccaaacgacgtggtgttgagaaagtttgaatggcttcaaaagacaggcgttttcccttgaggaaggctgccattttttcgcctagttgtttttcacttggcgtaacaacataggctggtaattcttcaagaccgagttctactaataagttttttgtcatgttttttctccgaaaagtatctttttattttccagtttgccttatgtgattggcacgcaagcaaccaacttcgttgtttcattgctaaaattggagccaaaagtctccaattttgcctagtatccttagtttcactaaggataccttcatcactgcggcaactggctcagggctcactctgttcgcccattttcgtaatttgtcactctctttattctgcgtcttctgctaggagtttagctcttgtttcttcatccaaaagtgggtagcctaggcgtttgcgttctgcgacaaaggttttggctacgacacgggccaagttacggatacgagcgatatagcctgcacgctctgttacagatacggcaccacgcgcgtcaagcagattaaaggtatgtgaacatttgagaacatagtcataggcagggtgtaccaagccttcttctaatgcacgaccagcttctttttcaaacttatcaaagttttcaagcaacatttcttggtccgaaatttcaaatgaatattttgagtgctcatactcaggctggataaagatttctccgtattttacaccatcagcccactcgatatcatagacagagtctacttcttgaatgtaagaagccaagcgctccaaaccataggtaacttccgcagtcacagggccagttgccaatccaccgacttgttggaaataagtgaactgagtgatttccattccgtcaagccaaacttcccaaccaagaccagctgaaccagttgatgggttttcccagttgtcctcaacaaaacgaatatcgtgctccaaaggattgattcccaatttttccaaagactcaaggtaaagttcttggatatttgatggagaaggcttcatgaccacctggaattggtggtgttggtagagacggttagggttttccccataacgaccgtcagcaggacgacgtgatggctctacataagctgcattccatggctcaggtccgatagcacgaaggaaagtgtaaggactcattgtccccgcacctttttcattatcataagcctgcataagcatacaatcttggtcattccaaaattgttgcaaagtcaaaataatttcttgaaatgttaatttcttagacattgaatactccttaataaaaaataatttcttgcgacacgagtctgcctcgtcgattatacgaggcaagacgagttagtactgcgtctagctcaggcactctagtgctgagcgtagggcagtccgactgtaaggaggtttctgccactgacgcagtgaaatgttaatttcttagacattgaatactccttaataaaaaataattacttgcgacacgagtctgcctcgtcgatcatacgaggcaagacgagttagtactgcgtctagctcaggcactctagtgctgagcgtggagcagcccgactgtaaggaggtctctgccactgatgcagtgaaatgttaatttcttagacattgtttactcctttagtttttatatttctttttcaattaatttctgctgaacaaaccaatctaacaagggaaaagttttttctgtatttgcccataaatgataagaatctaagaccgcttgtacactacctaaattttctaccaacttatctactgtcaaaaagctgcgccagtattcataaaaaatacttgcatagttcttatcataagtcgaagaaccaaaatcattcaatgaatgccaactatacttcttctgaaaaagttctacgagagattgattacaaattttttccgcttgaaattcctcttctgtcaagaaatacttgcgactaatatattcaaccatcccctcttcgaaccagatataagagtcataaccatcaaaatcatctaaaaaatgtccgaccaatgagctaactcatgtcctacaatctgtaagaggaaattttcagataaagaatgatagtgactttctattgcttgagtttgctcagaacactcgtagtccatcaactgatacaaatacaattctttccaaacagctaaatcaggcgtcataaccactcgtctattatttgtataggttggaacagcactttccctaataatctgtgtagcagcattaaaatctgaccaaataacagcttgcggtaaatcacagactgcaagttcattctttaaaaaagattgataatctttcaacttttcagtatttcttactacaaaatcacgaaatgtagctagttgactatcgtcttttacaagataaaggttgtccacggctctcctttctttcacacaatagactgaataagcaaaagaaccacatctgacaatcctaggttgatttaacctaggggcgtcagaaacgcggttccaccctaatttattacttcattgtttttgaaaatactacagaaagcgccagccctttattttgccctacttggctcccactatcccaagctcgcttgaagaacgccataagactttctttcctgctgactattatatcaaaaattagaataatgtacaattctttttatgattttctagaaatccacatcatcaactcgtggagcacccgattgaacagcaatcgtttttaaggtttctctctcctcatgactcagttcaattccaaagcaatcaagattagcttgaatacgagaggttgtgacagattttggaagtggtaaaaatccttctgccaagctccaggccaaggctatctgagcaaccgattttccgtgatttgctgctatttcttggacttgcttgctatcaaacagttctccttgtccaaaaggcccccaagcttccaataaaattcccttttcacgacagtaagctacgacttgatcttgatacacacctggcgccaagcgaacttgattgaccgcaggaacgatagttgcagtttcaagcaaggcatccaaatgatggggaagaaaattgctaacgccgatagcacggattttcccttcttgatagaggtcttccatcgctctccaaacttccgcattgcgagttttccatgcgtcattttctctgagcggttttgggttcggccaatgaatcaaatacaaatccaaataatccaagcccagtttttctatagatttttccaaagcttgacgagtttgctcataggtttgctgactattccaaagcttggtagttacgaacatttcttcacgtggaactccgctatctttgattgcttgaccaacactttcttcattctgataaatcgccgccgtatcaatatgacgataaccagccttcaaggcttctaacactgcacgataggcttcttctccatccttagccttaaaagttccaaatcccaatactggaatttctactccattatttaattgataggtattcatatgcttctccttctattttattcatcaattatagcataaaacattttttaagtagtactatattctgtaaaaaataagtctgtcaaatatctaacagacctattttttcttgcttattcatcacgactatagtacagctcatgagcttttaggcgagtattgagcatctctggtatggtcacaaaggtataaccttgatttttcaaatactcaatgacccttggcaaggcattgactgtcggactgtgaatatcatgcatcaaaacgatagagccattagctacttgatactgaatttctgtcaaaatagatgcttcatttttactcttccagtccagactatccacatcccacatgataaagctcaaatccaagctattgcgaatatcatctgtaatagcaccataaggtggacgcatgagtttagaactagaacccagcactttagttagcacatcctcagtatcagtaatctgctttttagcttcatcaagagagagttgcgagagaatcggatggctccagctatggtttccaacaacatgaccttcagattttatcctcttcaccaagtcctcattcccagaaacatttttcccaagcacaaagaaagtcgctttaatatcatatttagctagggtctctaatacctgcggggtcgttgctggatttggaccatcatcaaaggttagagcgacaactttttgatgtttcttatcaaagtaagattggtacaaggccgcatctttttcgagtaagtacgaagattggataacatcaaagaaagcagatactggcaaggctatctcttctaaattttcaaccacaggacttggataaaggataatctgactatccttgtaatcaaaattccatgcagacaagtcttggtcagagaagttttttacaatctgctcactctggtcttgctctatttttttatcctctatgaaggaggtcaactcttttatcagctgttccttagccttactagcatctgaaaacagttggtcaagtgtaaaaggttgcccatcttctgttaagtgaacctttcctagactggtcttttcagtctcttcaatcttaaaagcaactaaatcatagatttgtttggtcacattacgattaacgactccctttaaacctgactcttcttgctctgtatagtagaaaacaagattgtccttactttctagcttgtccttaacatcttgatttatcagctccctaacagaggaaatcactttctccccttggagaggataataggcaatcacttcggcttgcccctgacgaaaatgctccttctgatttccctcactcaattgatcatctttctcttttttgagcgattcaatcttttgctcaaaacttttttgctggtagatcttaaaagcaataaatccgcctaataggcaaatagaaattgctaaaataccaatcaaagccaataatacatgtctcgttttcccgtgtctgccacgtcctagtctacttttattcatatttatatcataacaaatttgagcaataatttcaatgatacaatttggcaatccacaattcctctagcaagccaaagcatcttacatcaactccaacatccgtatctgtagagattatgtagttttctatctatggaatttctagtagattgaagctagaatagtagacctatacttctaaaacattgttagaaatcgatttgactgtcctgatcgatttgtcctgttctcatttcattttactataaaactatgaaaagctaggtcatctgagaagtaattactatcgacaattgcgatagcgtatactagtgcgatttgtttgtagctctggtgggtatcaccttcacgttggcgaattttttctaggttttgattaacctgactgcacagataaggccataggcgattgatgaaaaaattctgatgatgaacctgaatttcgatgataacttggattccattatctaactccgccaagacgtctatactagtatagaaatcttacgctgagtagggcatggaaggcaagacgtgaatgttacttccctccaaaatcgtcacattttttgctggcaagtccagcatatcgcggataaattgacaaatcattagttgggctgatacctagatgtctgagaatcctccttttcctccttctattatagcacatttttaaatctaggtttgctagattctatgcttctatctatttattcggaaaagaaagctaatagcttatttgaaattttctcctctctgttggatagtcccgtctatctatgttataatgaaagaaggatttaaaatcggaaaaggagtatttatgctaaaattaggtgtcatcggaactggcgctatcagccatcatttcatagaagcagcccataccagtggagaataccaactggtcgcaatctattctagaaaactagaaactgcagcaacctttgcttctcgctatcagaatatccaactattcgatcaattagaagtcttcttcaaatcttcttttgatttagtctatatcgccagtccaaactccttacattttgctcaggcaaaagctgccttgtctgctggtaaacatgttattctcgaaaagccagctgtctctcaaccacaagaatggtttgatttgattcaaacagctgaaaaaaataactgttttatctttgaagcagctcgtaattaccacgagaaagcctttactactatcaaaaactttttagcagataagcaagtgttaggagcagatttcaactatgccaaatactcttccaagatgcctgacttgttggctggacaaacaccaaatgtcttttcagaccgttttgctggtggagccctcatggatttggggatttatcccctctatgctgctgttcgtctttttggaaaagccaatgacgcgacttaccatgctcaacagcttgacaatagcattgacctaaatggagatggtatcctcttctacccagactatcaagttcacatcaaggctggaaaaaacatcacttccaatcttccttgcgagatttatacaacagatggaaccttgactctcaacacgattgagcatattcgctcagctatttttaccgaccaccaaggaaatcaagtccagcttcctatccaacaggctcctcatacgatgactgaggaagtcgctgcatttgcacacatgatccagcaaccagatctgaatctctaccaaacttggctgtatgatgcaggctctgttcatgagctactatataccatgcgccagactgctggcattagatttgaggcagaaaaatgaaaaccaaactaccgactgaatggcaagaactgagtgaccaactcggtttccaagaattcacccccattcaaactcaactatttgagccccttcttgctggagaaaacctcctaggagtgagccaaaccggaactggtaagaccctagcgtatctcctaccaagtcttctcagactacaaaagaaaaaagcccaacaactcttgattctagcaccaaatacggaacttgctggacagatttttgatgtatgtaaaacgtgggcagaagctatcggattgactgctcaactcttcctttcaggttcaagtcagaaacgacaaattgaacgtcttaaaaaggggccagaaattctgattggaactcctggccgtatctttgaactcattaaacttaaaaaaatcaagatgatgaatgtggaaaccatcatcctggatgaatttgaccaattactagatgattctcagattcactttgtagaaaaaatcactcactacgcacctcgtgaccaccaactggtctacatgagtgccacgaccaagtttgaccaagaaaagattgtgccgaatacacgcactattgatctctctgatcaaaaattggacaatatccagcatttctacatgcaggtagaccaacgtcatcgagtggatatgctacgaaaactggctcatgtagaggatttccgtggtctagtcttcttcaatagcctgtcagaccttgggaatgccgaggaaaaactacagtatcgtgatatattggctgtttccctcgctagtgatgttaatgttaaatttagaaaaatcatcttagaaaagtttaaagataaccaactaaccctgcttcttgcaactgaccttttggctcgtggaattgatatcgatagcctagaatgtgtcgtaaactttgatattcctagagatagcgaaacctacacacaccgtgctggccgtactggtcgtatgggcaaggaaggttatgttatcactctcgtcactcatccagaagaaatcaaaaaacttaaaaagtttgcaagtatccgagaaattgtcctaaaaaaccaagaactctatatcaaataaagccccattgctctatacacatccagtgtatggagcttttttataagcaattcaattttatactcatctgttttcaaaaagcattctagtccatctccgattaacgatggactttatcacctccttctccaatccttgtatgacatcttggagttgattcatgacatcttccaaagttcgaaaggctttattcttaaatccacgtttacgaatctctttccacacttgttcaatgggttcatctctggtgtgtatggaggaataaaggtaaaaccaatattagtcggaatctttaaggtacttgatttatgccatatagcattgtccataacgagtaaaagataatcatctggataagcttgtgaaagctcttctaaaaaggcgttcatccactcagtattacatccaccagctattaagaaaaatgattcgcctgtatgggcatcaacagctccataacaatagcgaaattctcgtatatagtgactatggacatgtggacctactcctattggagaccaacaagatcccagtttactgattctaccgaaaccagcctcatcttggtacatcaagcgaaccttatgaaaaggtctactggttttaaagcgctttcttgtgtactgcccccaaacagttagacaaataatttatccaaaggatttagttctgtactgcacaggactaagtccttttagttttatcttaattttcttattgttgtaataatcaatatagtctataatggcttgttccaattggttaagtgatttaaatgttttctcatagccataaaacatttcggattttaaaatgccaaagaaagattccatcctaccgttgtcttggctgttgcccttacgtgacatggatgcttgaattcccttactctctaggaaccgatgataagaatcgtgttgatattgccagccttggtcactatggagaatcgtattctcgtagtgcttctctttgaatgcctgttccaacattgtttgtacttgttctaaattaggcgaacaagaaagattaaaagcaataatttcactgttaaagccatctaaaactggtgataagtaaagcttttgagtacttgctggaatggcaaattctgtcacatctgtgtagcacttttccattgttttagagccttcaaattgtccttgaatgagattctctgccttcttgccaacgtctcctttatgagaagaatattttcgtttctgtcgcattttagcttgtaaattgagtacttttatcaagccttgaactcttttatgatttaccagataaccacgatttcttagttctaaataaatccgacgataagcataatttcccttgtgttcgataaaaatggattgaatttcagctttaagctcttggtccttatctggtttatctagctgtttcaagtgatagtagtaggtcaaacgagctagtttaatggcttttagaagaatatctaacgaaaactcagtcattaattcttgaataatttctgtctttcttctttctctttttcctccttcaatcggagttctcttaacttttttaggatggcattctccgctctcaggtactctccctcttgttttctcaacaatagtatacccgtttttcctgtattgtgctagccagttaagaagtatcgtacgacttgggagacagtattcaagagaaactctatctttagtccagccttcatgtcagactttatgaatcatttcttgttttaaatcaggagaatagtaacgattttttccttttttgacgaactctattccgtaacgatcaatcaatttaatcatgtacctaagattagaattgtttatcccaaatttatttgaaagcttctctaagctatatccttgttttctaagttcatagatctgaactttatcatcataagttaatttcataataaaaacaccccaaaagttagattttttctgtctaacttttggggtgcagttcacttgtcttcttgaattgagactttatttttagacgcgacaatggtttgagcatctgctttcttaggatgttctggacgtggcgtaatatttcgccaaccatggcgcttcaacagttgatagaaggcatcacgtgtgtaggaacgacctaactcctttttataagcctgaaataaggcatcaattgtaacaaattctcctgcctctgtagccttcaaatggcgggcaagaaagactttctcttgctcaaccgtcatataagcatggttacgaccaccacgtgtttcttgaaggagagagtcgagtccgaactcctcatattttttacatttcgccaaatcgttgtttgattacagtctaaagtgtattgaatctataacagtacaccttggctgctaaaatatttctataaattagtttgactttcctgatagagttgttcacatcttatttcaaaccactataaaagttctataatctctttataagatttgcccatcagacgaaatagaacgatttgaaggcgtttatgatatttagctgtacgagagtcttttaaaagtgttttgatggtttggatttcttctttaattgatttcatattactattgtataatgctttttgattttagtctagtattatactcttcgaaaatctcttcaaaccgcgtcagcttcgccttgtcgtatagatgttactgacttcgtcagttctatctacaacctaaaaacaatgttttgagcagtctgtagctaactttctatagtaaaatgaaataagaacaagacaaatcgatcaggacagtcaaatcgatttctaacaatgttttagaagtagatgtgtactattctagtttcaatatattatagtttgctctttgattttcattgagtattagttcaatatctaaaaaaagaaccttgccaagcaagattcttttagtgtctaacttaaataattgttcttctgggaactaaatcgaattaagcttcgatttctgtaaccatacctgaaccaacagtacgtccaccctcacggatagagaatgtagtaccttgttctacggcgattgggtgaatcaactcaacgtcgattgtcacgttatcaccaggcattaccatttcagtacctgctggaagttcgattgaacctgtaacgtcagtagtacggaagtagaattgtggacggtagttgttgaagaatggagtgtgacgtccaccttcttctttagtaaggatgtagacttcacctttgaatttagtgtgtgggttgattgaacctggtttagcgataacttgtccacgttcgatttcatcacgttgaacaccacgaagaaggacacctacgttatctccagcaagaccttcgtcaagttgtttacggaacatttcaacaccagtaacaactgctttttgagtttcttctttgataccaacgatttcgatttcgtcgttgactttaacgataccacggtcgatacgtcctgaagcaactgtaccacgtccagtgattgagaatacgtcctcgactggaagaagcaatggtttgtcagtgtcacgttctggttctgggatatactcatcaactgtgttcatcaattccataacgatgtcttcgtatttagagtcaccttcaagagctttaagtgctgaaccttggataactggaagatcgtcacctgggaagtcgtattctgacaataggtcacggatttccatttcaaccaattcaagcaattcttcgtcgtcaaccaagtcaactttgttcatgaagacgataaggtgtttaacaccaacctgacgtgaaagaaggatgtgctcacgagtttgtggcattggtccgtcagttgaagctactacaaggatagctccgtccatttgagcagcaccagtgatcatgtttttaacgtagtccgcgtgtcctggagcgtcgatgtgagcgtagtgacgtttttcagtttcgtactcaacgtgcgcagtgttgatagtgataccgcgttcgcgttcttctggagcagcatcgatagacgcatagtctttaggttggttaactgatgaaggcaagcgacgtgccaaaacagttgtgatagctgcagttagggtagttttaccgtggtcaacgtgtccgatagtaccaatgttaacgtgtggtttactacgatcgtatttttcttttgccatttgagtaaaagcctccaataaaatatattttatagatagacagtaggcaatacagtctaactttccttactattttatcaaatttcagctaaattgcaagtgttttacaacgtttttgtgaattattcttggtaaaaatttaactaattaatagaaagtactaaatagacttatccttcaaggagttttcagcattatccatccactcacttgctgaaaatgtaaacagtctctggtttatatagtaaaatgaaacaagaatagggcaaatcgttcaggacagtcaaatcgatttctaacaatgttttagaagtagatgtgtactattctagtttcaatctactatacaacctcaaaactgtgttttgaacaacctgcggctagcttcttagtttgccctttgattttcattgagtataaaattgcagataaaacgataacaatcataggactcagcagagtcaatgtaggtcgaagaatagcccccctaatcgcttattttatagtaaaatgaaatagaaactgaacattttgttgaggaaggtaaatcaattcctcacaatgtttgagaaagaagggaggactattccaacttcaacccactataaagcagacttacaagatagggaacccatctccgataatattccgataatatatagtagaatgaaaactgcacaatttgattggagaattcaaaccaatttctcacaatgttttagaaacaagggtctattatttcaactgcaacctactatagtccattgaagctggaatagcccactgagacttctaaaccactgctggagaggagtttgtttagagtttctttcatttccctaaaaaatcaaaaagagagaaccagtctgatcctctcttacttatagatggtgctcactcaaatgttaaaggagctatttcttagagataaaggaatttgaatacagctactgccgcaattgctgctgcgataggtgctactactggtacccaagaataccaccattttgaatcgcctttatgctcaccaagaactgatttgggaaggaaagcatgaaggagacgtggtcccaagtcacgggctgggttcaaggcaggtcctgtaggtcctccaagtgatgttaccaaagccataacgaggaatccaagtgccaagtgagccacagaaagtcctgaagcagtgtgtggagccacctgtgctttaatagccaagtcagaaaaatcaactgtttgtcctgcttctgttgccttttgtttcatgaattgaagcacttcagcaccaaagaagtttttagtcaaaccaagagctgcaaagaacaaaacaaatgaaccaacaaactcattaatcaaaccattgacagttgctgcatagcgactttcttttgtaccatggtcaatacttgaaatagttgagaaagttcccaagatgttatttgggttttcagttttcaagtagaatggacggtatgttgccacaactaaggcttggccaaagatagcccccaagacttgcgcgataatgtaaggtaccacttgtgcccaagggaaaagaccgctaactgcaagccctagagtgaaagcagggttgatgtgattcccagatacgttaccaaacatcaaggctgggatcataacccccataccataaccaacagcgatgacgatccagccactttggtgacctttcgtacctttaagttcaacgttggcaactgcaccattcccaagaatgatcaaaatggcagttcccaaaaattcagtggcatacttcagtgcccatgtgaaatccatttgctagattctccttaaaattttttagatattccttattttatcaatttttaccctatttagcaactgatttctggaaatatttttaaaaaaataggattcatagtttcccagttcaacagacttgtaagcgtttttattctttacgaaagacctcgttctcaaaaccaggaaaaaagcccacatctgtgagcttttcctggttcctagattctaaaatctattatttttcatcttcttttttcttgaaaaatcctaatcctagaccagctaacaaggtcatgataccagcactagccaaggtagcattagcttctgtacctgtgtttggcaattcctctctcttacctgtctcataagtcggaacttctgggtctggattcactggagtttcagtttttggagtacctggttctggagttggtttatctggtgttggagtctcttgatttggtagttctgggtttggtgtcggaacacttggatgctctggatttggttgtgggattggtttttctggtgttgataaacggtcataccttaccgttatttctttatcactagagtctgacgtaacttcttgtgattcaactgttggaatatctggatctttgtacttgtcaatcttaccagatataacctcgtcccagtttcctgttgtccattcaccgtaggttacaactcccgtgaccttgttctcagtttttgtacggcttaaggttacaggttgaacaacatcttcttttacattttggttcgtaactttatcaacgtaatgaatgatacgcgttatagtcttcgtctcagtagaggttgctgttttgggaaccactgtttcctcaacattctcacggtagtaatagtcaactgttgcaccgtcttctggtacgcattttcaggagttgctaccaaggtgtatgttgttttccttgtgataactcggtcttctttgtcctcagttgttgttttcccttcaatagtttttgattctgtggtatactcagaacctatcgctaaatcagcttttataacagactctaccaacttctcttgcctaccttctttatagtaattggctgttactgtagcagtggttggcgcttcgctttctctataaactaaggtcactgttctaccttcgcttacaatattcccagttaaacttgcagaatttgtatctgcttctttaaaagtataatattttccgtcagtagtagtcatgctactgagttttttatctgtgacattatagctggtaccaatcagttgttttttattggtaatgtaggttccgtcactttctttttctccaattccagtatcatttttcaatgatagcaaacgcccttgttcatcaacatagcgaactttcacattttctgagattagttctgccaattctgaggtttttttctttttcttgatttcttcggttattttccctttctcttcttcgggaatatttagttttggaatgattttttcaacaacggttcgtgatggttccacagtatcttggatgactgaaaagtcagctagaattgggagattatactgaacacggtgactttgagtgtttactcctactctttcattattctctgaaaatacttgtacggtataagaaacaacatcttttcctaatagaacatccccagtagagaaatagccgccttttcctagtttgctatctccagagcccacttctttcctaatcttatcagatagttttttaccagtcagtacattcgttcgcacaatccctttgtctacccctacaaagtgggagaactttttgaactcttcagaaccagatctagcccaaccattattaagggcatttgcttttgtatttgtattctctctcaaaagtttggcgattagaattatattcatcggcacttagagttgctgctatatctgactcttgaataccaacttccttactaccatttctagcggcagtatatgtgtatttatctgtttctacttctagctgattatccttaacatgataggtaattttctcctggtataagagtcttcagtagtttatatactctgtcatcatctttagctttagaagcagctgagtttagccaagttggggtattaggagtatctttatcaacctgtttcaagacattattcaagtcatttgctagcctattggttatcctcactgtgaaagttttcttccagtctgaaccacttttattagacttagatatgctcatgaaatcctggtcaacattcaacacaatatcgccttgttttttagcatcttccgttgcttctgcttcaaattgatcatggagtttttgttgctctggtgtatagtttttttatttacacgatttaatgtactattttttattttagtattaagaactccattaatacgatttttaaactctgcttcaaaaaatcccttaatttgttggtgcgcaagttcaacattcaaacctttcttatacaagtcttcattctgatacaagtcttcattctgaacgatttcggctacacggtgaatggtttgattgtataccgtcttctcttaaccagcagtatccttagttttaatgactactcgataggttcctttagaaccgttatagtcatctagttttaaaaaagcattccaaacattcaaaaatagttggaacttcccttaatacatccgtcactttctttttcaagatagcccaagcttgctcaataggattcaaatccggtgaataaggtggtagaggtaagaaaaagtgtttatcttggatgcagagttcatccaaaatgttcttgggatgaaaaccagcattgcccatgacaataacatgaggtgtcttcaaagcaggtaggagttgcgttttgaaccactccacaaagaaatcgcttgtcatgcttttcttgtaaatcatgggagctataaactctccgtctacttgtcctgcaacaattgaagttcgctcaaaacgacgtccgctaatcttttcatagactttctcccctctaggagcccctgcataaggacgatagagatagcggtcgattcctgtttcatcaatataaacaggtgctaggtgctttaaactattaaaattcttaagaaataaggctacttttctgggtcttgttccttaaagctcgtcatctttttttaaagtgaccttaatctgctttaaagctgcccatactgaaggaacagcacaatcaaaatgtgccgcaatttcccgtaaaaaagcatctggatgagcctctacaaaggctttcaattcctctaaaggaatctttcggtttttgacgactcgctttttcctctctatgtgttcttgttcacgtctttcttttcccacgtgaagagagttctgacgccaacaccaaaaaacttggctgcctcgacatggctgtgcccctctttgatgtaatctaatgctcgctgtttaaaatcagtactatatgccatagctttattataatatgcttgtttaaaactaagtaactatatcaatgttttgttatgagaagacttactttttttactgaaattgaatttttcctagcctcaacatcatataaccccaaaattcaatctgacctggtttgaagagatgttcgaagcagataaggttttactaaaactaaaaaaaatgatataattaaactgattaaatgttttaaaaataaaggagaatttgaatgtcttaccaagaaaattaccagaaatgggttgattttgtggagcttcctgactaccttcgtcaagatttggaaaatatggacgaaaaaactaaggaagatgccttctatacaaatcttgaatttggtactgcaggtatgcgtggcttggttggtgctggtacaaaccgtatcaacatctacgttgttcgccaagctactgaaggattggctcgtttgattgagtcaaaaggtggaaacgagaaagaacgcggtgtagcaattgcctacgatagccgtcacttctcacctgagtttgcctttgaatctgcggcagttcttgctaaacacggcatcaaatcttacgtatttgaaagccttcgtccgactccagaactatcatttgcagttcgtcatctcaactgtttcgcaggtatcatggtcacagccagccacaaccctgctccatttaacggttacaaggtttacggtgaagacggtggacaaatgcctccacacgatgcggacgctttgactacttatatccgtgcaatcgaaaacccatttgcagttgaagttgctgatgtggaaactgaaaaagcttctggcttgattgaagttatcggcgaagctgttgacatagaataccttaaagaggttaaggacataaacatcaacccagccttgattgaagaatttggtaaagacatgaagattgtctacacaccacttcatggtactggtgaaatgttggctcgtcgtgctcttgcccaagcaggatttgactctgttcaagttgttgaagcgcaagcaactgctgacccagacttttcaactgtaacatctccaaacccagaaagccaagcagcctttgcccttgctgaagaacttggtcgtcaagttggtgcagatgttcttgtcgcaactgacccagacgctgaccgtgttggtgttgaagttcttcaaaaagatggtagctacctcaacctttcaggtaaccaaatcggtgctatcatggctaaatacatcttggaagctcacaaaaacgctggaactcttcctgaaaatgccgctctctgcaaatctatcgtttcaactgacttggtaacgaagattgctgaaagctacggcgcaactatgttcaacgtcttgacaggtttcaaatttatcgctgaaaaaatccaagaattcgaagaaaaacacaaccacacttacatgatgggatttgaagaaagcttcggttacttgattaaaccatttgtacgtgataaagatgccatccaagccgttcttgtagttgctgaacttgctgcctactaccgttctcgtggtttgacacttgctgacggtatcgaagaaatctataaagaatatggctactacgcagaaaaaacaatctctgttactctttcaggtgtcgatggtgctgaacaaatcaaagcgattatggctaaattccgcaacaatgctccaacagaatggaacgcaacagctatcactgtcgtagaagacttcaaggcacaaactgctactgttgctgacggtactgttacaaacttgacaactcctccaagtgatgtgttgaaatacacacttgctgacggttcatggattgccgttcgcccttcaggtacagaaccaaaaatcaagttctacattgcagttgtaggggaaaccaacgaagaatcacaagctaagattgctaacatcgaagcagaaatcaatgcatttgtaaaataaagacctataaaagatgagaccaaccaacctcatcttttttcgtatcaaatctaagcaattttagaaactttatggcatactagacttatcaatgaaagcgaggtaatctcatggaacaatttttagataacatcaaagaccttgaagtcactacagttgtgcgtgcgcaagaagctcttgataaaaaagaaactgcaaccttctttatcggtcgcaaaacttgcccttactgccgtaaatttgcaggtacattgtcaggtgtcgtagctgaaaccaaagctcacatttacttcatcaatagtgaagaaccaagccaactcaatgatttgcaagcattccgctcacgctatggaatcccaactgtaccaggttttgttcatattacagatggacaaatcaacgtccgttgcgactcttcaatgtcagcacaagaaatcaaagatttcgcaggattgtaaaaaatcagctaacaagtcttaaaatcacaaaaacgcataatgtaaggtgcaaaaaccttgatattatgcgttttattgttcctaaaacagttacatcagtatttcattacagaacattttaattttggaagtcaaatcaatttttaacaatgttttagaaatcacagtgggctattccatattcaattatccatattcaatcgctattatcgttttcctagattacaaaaaaaactacgttttgctaatcaaaacgcagtttcagccactattttatcttactgtccttcttttacttctttggttgctacatcttctccaaaccatttttggctgatttcttggaacttgccgtccttgtaaagactagaaaaagcttcatttatcttcttaaccaagtttgtatcttccttacgggctccaaccgcaaaagcttctgtttctagtccaactgtaaagacattataatcgtttaaaacaccttctgcttctaaataatagtttgcatagacacggtcaatcaatagaccatcaattcgatcgtttttcaaatcaatcaaggcttcattaaaggtttggtattgattcgcttccttattagcgacaatattcttcaaaatttctggatttgcttcaaagtccgcataaccagatgaaccagcttgagctcctaatgtctttccagtcatatcctttgcagtcgtgataccagatgatttcttcgtaaccaatacctgctcattcttcatatatgagttactgaaagccaccttttcacggcgttcgtctgtagcggaatagccattccaaatcagatcaatcgttccttttgtcaattcagcttctttcaaatcccaatcaatcggttgccaatttaccgtgattccgtatttttcaaaaacagctgtagctaaatcaatatcaaatcctgcataagaaccatctttctgagcaaatcccattggaacaaaagtactatcaaatccaatagtaatagacttgttagactggtactttgaccaattatctccactagtttcgctagaatttttcccacaagctactaagaacaaagcagtcatcagactgactaatacaagcatccattttttcatccatttttcctcctatttaggttctactttcaataatacatctgcgatattttcagcaaactgcaaatcatgggtaaccacaatctgggtcatcccaagttccctattttgcaagattagcttctccacttccaaacgtaattctggatccagggcagaagttggttcatcgtagccaatgatttctgggtcaatcatcatagcacgcgccaaagccacccgctgcttttgcccaccagatagtgagaaaggataggcctctgcgtgtcctcctagtcctaactgttccaagagtccactcgccttcttctcagcctcttcctgcttcattcccatggtcttcacaggcgataaagtcaaattttccagaactgatagatgaggaaatagttgaaaatcttggaagacaaatcccagtagattgcgcttctgcaattcatccagctctaaaggttgtccattataaaagatttgccctgaatcaatggtttcaagacctgcaagcatacgtaaaagagttgtcttacctccaccagaaggtccaacgatagccaggatttgcttttcaggaatacttagactgaaattagacaggatttgtttgtctccaaagactttattgatatttcgtaattctaacatggcagcctcctatctataataactatacttcttctcaacttttttggaaataattgtcacaatcccaatcaaaatcaaataaatggctcctgccaagaacataggaactagactagcatcgcggttagcagctgttcgactagccaagataaggtctgaaattccgagagcatagaccaaagaagtatccttgaccaaactcataacttcattaaagacactaggaagaacgatcttggtcacttggggcaagataatatagcgcactctgtcaaaagggctaaacttcaagaccttggcggcctcatactgtcctcttggaatagtgtcaattcccccacggaaaatttctgcaaagtaagctgcatagttgagaacaaaggcaataatagctgcaggaaggcggtctaaacgaatcccaatacttgggagcacataatagataaaaatcagttgcaagagtaagggggttcctcgcataacccagatgtaaatgttaatcagataatggaggggcttccaatggacttgcaaggcaaaggcaatcaaaacgcccaagggaatcgaaaatagcaagaccagtgcaaagacctgtacagtcgtgctcgcaccattcagtaaactcggtaatatctcaaataaataagacatactgcacctcctaaaagtaattgttcctattatagcatgaataaacaagattaccaagtatttttgtaaaaagattctaccatatacaaataaaaaccgtagctatcaaaagagataaactacagttctatatgtttaaaccccaattattcaccccaaatctaaaaaccatccagaatccttgccttagcttagatcctggatggtttcttttttcacccaatgggtgttttttactagacaaaaaagagtttcccctttatggtataagtgtagaaaaaaacacaaaaagaaaggaaactcacatgaacagtttaccaaatcatcacttccaaaacaagtctttttaccaactatctttcgatggaggtcatttaacccagtatggtggtcttatcttttttcaggaacttttttcccagttgaaactaaaagagcggatttctaagtatttagtaacgaatgaccaacgccgctactgtcgttattcggattcagatatccttgtccagttcctctttcaactgttaacaggttatggaacggactatgcttgtaaagaattgtcagctgatgcctactttccaaaattgttggaaggagggcagcttgcttcacagccaaccttatcccgttttctttccagaactgacgaggaaacagtccatagtttgcgatgcctcaaccttgaattggtcgaattctttttacagtttcaccagctaaaccaactcattgtagatatcgattctacccatttcacaacttatggcaagcaagaaggtgttgcttataacgcccactatcgtgctcatggctatcatcctctttatgctttcgaggggaagacaggttattgtttcaatgcccagcttcgtcctggtaatcgttattgttctgaagaggcagacagctttatcacacctgttttagaacggtttaatcaacttctctttcgaatggatagtggctttgcgaccccaaaattatacgatttaattgaaaaaacagggcaatactacctcataaaactcaagaaaaatactgttctgagccgtcttggagacctttccctcccttgcccacaggatgaggacttaaccatcttgccccactccgcctactcagaaactctctatcaagcaggatcttggtcgcacaagcgtcgtgtctgccagttctctgaacgaaaagaaggaaacttgttctacgatgttatttctctcgttacaaatatgacgagtggaacaagccaagaccagtttcagctttatcgtggacgtggtcaagccgagaatttcatcaaggagatgaaggagggattttttggcgataaaacggatagttcaaccttaatcaaaaacgaagttcgtatgatgatgagctgtatcgcctacaatctctatctttttctcaaacatctagctggaggtgacttccaaactttaacaatcaaacgcttccgccatctttttcttcacgtggtgggaaaatgtgttcgaacaggacgcaagcagctcctcaaattgtctagtctctatgcctattccgaattgttttcagcactttattctaggattagaaaagtcaacctgaatcttcctgttccttatgaaccacctagaagaaaagcgtcgttaatgatgcattaaagaacagtcgagatgaaaaaatcgtgtgacgcaccaagggaggagtctgcccttttgaggaaatctagcgaggaaaaacgatactggaacagcagaaagtaaaactgacctcatgaggaggaagaaagtggctcatgaggtcaggggttttgtaagttacatctagttgagagaggtatgaatgatttgggttaaacattcttacaatctctcaaacagttcttgcatttgcacatcatctggaaccagttttaagtaagtgtgagcatggacttttgcttcttcaaaatgtcccaattcacgcaagagatagatatagtgttccagaaattctggattgtccttcaaatctcctgtcaactcttgataatactcataagcagtatccaaatcgtccatttcttgataagaacgagcaatcatccacttggtcaaaagattttctggctcctcactctgcaattctagaatatcctcataacgctcctgctccagataaatagtggctaaacgaagcaagatttcttctgtatcctcagcgtcttcttttgcagtaaggagataattttctgcaccactagcatcatgcaattcataagaaaattgtgaagcagctagcaagaggcgagtttcaaagggatttttctctaatccttgcttagcgatacgcagggcttcttgaacttgatgttccttatgtaaagcctgactgtacccatactcatagccttcaaagtcaggagaaatggtatcaagctgcttaaagtagagggtggctttttgatattcttcttgatcaaaataaagactggccaactcaaaagctgttaagtcatcgtattctaactccagggctttttctaaaaactcagtagccgtttcaaatttccctaactgagcataggcaaagccaattcgttgataggtggaaatgcccgtttgctcataaatcgagcgattatctaactgggcataggcttgaatagccgcttggtaattttccaactcactatccaactctgccaaacccaatatcaagagagaatcctctgagtaggtcaaggcctccaataatttctcacgtgccacatctgtcaaaccttccagctggtaaaggtctgccttcagagccaaagacgagacataccagtcactgtcagcttggatttcctcaagataggtaaaggcttcttctatttgaccatcctcgctagcaattgcagctagattaagatgaacctctggaaaatcctctacaattttcaggtaaatttccttggcctgaggatagaaaccaatcccttcaagataagttgccaattcatacagaagatcacttgaatcattttctaaagctttggcgaaataatgctcagccttagttaaatcttgctcctccaaagcctgtaacatctgttgactattgttcactcttgacttcctcaccctctaattcatatagaccactgactaccttataccattcgaaaatggctgaaatgacaaccttagcagaggcataaaccggaataccaagtaaaactccccagataccaaacatagatcctgaagttaacaaaacaaagagaacattaatagggtggatgtttaattgacttcccaaaatcaatggagagacaaaacggccttcaatagtttgttctacgataaagacaatcactactttcaaaagcatgactggaccagcaatcaaacccaatactagagcaggaagcatggctagaaagctaccaagataagggaccagatttaaaataccagcagtaacccccagcgtaaccgcatagcgtagaccaataatcttgaagaagatgataaacattactgctacaataatagccactgtcacttgccctcgaacatagttggacaactgttgattcacatctgataaaacttgtccaacaggttccttcaattttcttggaatgaattgggtcaaatagttacgcaagcctttcccatcacgcaagagataaaagagcatgaaaggaacgataatcaaggcaacaatcacttgagaagccccgctaataaaggcactcacccagttgactgcctgagatgaaaccttacttgccaaaactgtagcctggctagaaaaattggtcaaaacttgctctaattgaggtctgaaatcatctggcaggtgctgggctaccaatccattaacaatcctatctatatcttctaagtaaacaggaacgtttcttgcaaaggtcaaaacctgacgttgcagatttggaatggcgactgccaagccccaaatgataaagagagcgatgataacaaagacaatagtgatagctataacacgattaaccttatgcttctccatccaatcaacaataggattcaacaaataatataacaaaccagacaaaatgactggcaacatcacaactgctaaaaagtctaaaacaggtgaaaatagaaaactaatcttacttaaaataaaaagattcagtcccaataataaggttactaaaaataccgtaattgccttgttatctaaaaaccacttgaaaaaccaagataggctaaaatgtttctctttttgctccataaatacttcctttctattgttctctcattataccatttttgaaacaaaataactcttttttaaagtgcttacatctaattggatatctttaatttacttgtttttgtgatataatagtcttatctttacacagaggtatagtaatgaaagaaactgtttattttggaacttatacacgtcgtacttctcaagggatttacaaggcagactttgatacagaaactggtcagctttcaaatctagaactttttgcagctgagccaagtccaacctaccttgcctttgaccagcaccaacatttatacactgttggtagccaagacgataaggggggaattgcagcctatcaaactgacgggactgtgttaaatcatgttgttgaagaaggagctccccactgttatgttgctgtcgatgaaaagcgtgatttggtttacgcagctaactatcacaagggacaagtccttgtttataaacgccaggaagatggtagtcttctacttagtgatatggatcaacacagtggccaaggtccacatgaaaatcaagcttccccccatgttcactatacagatttaacacctgaccactatctagtgacctgcgacttgggaactgaccaagtcatcacctatgacctcgatcaagaaggaaaattatctaagctctatacctatcacagcaagccaggagcaggctcacgccatatcattttccataaccactataaaatcgcttatctcatttgtgaactcaatagtactatcgaagttttaatctacgatggcgttggcgaatttgaacgtatgcaggtcatttcaactttaccggaagcttacgaaggctttaatggaaccgctgctattcatctctctaaagacggtaaatacctctacgcttctaaccgtggccatgattctatcgcagtatataccatccttgcggacggtagcttagagttattagaaatcgttccaacgcatggtcagactccacgtgattttgatttgacacccgaccaaaaatttctcattgttgtccatcaagactctgacaatgcaactgtctttaaacgtaattgtgacaatggtcgtctagcagaactctccaacgacttccatgttcccgaagcagtctgcatccgttttgctccttaaaacaccataaaaaatgaacttggtattttcaagttcattttttcttatagtctatttccgacattaatacggttaatagcacgttgcaaagcaatcttagcacgacgttcttggtcaatcaaatgtttgtcttgtgcttcttcaattgcacgttctgcacgaagtttggcacgttctgcacgactgatatcgatatcacgagcacgttctgcagagtcagcgacgattgtgatcatatcattggcaatttcaataacgccaccgtttactgcaatccagttcacgtgatctttatcatcgatacgttttacctttacttcatcaactgctaaaaccgcaatcatattttcatgtcgtggcaagatccccatctcaccatccagagttcgaaccgatacatagctggcatggtgatcatagacgagaccatctggtgtcacgatctggacagttaactgagccatagatcacctcttaaaatcccattttttcagcttttgcaatcacatcttcgatagaacctacaccacggaaggcatcttctggcaagtggtcgtatttaccatcaaggatttccttaaagccacgtacagtttcagcaactggaacataagaacctggctgaccagtaaattgttccgcaacgttgaagttttgtgacaagaagaactggatacgacgggcgcgagcaaccaaggtcttttcttcatcagaaagctcatccataccaaggatagcaatgatatcttgcaattcatggtaacgttgaaggacacgttttacttcagcagcaactgcatagtgctcttctccaacgatttcaggtgccaaggcacgtgagcttgaagcaagtgggtcaacggctgggtagatacccaattgtaccaacttacgttccaagtttgttgttgaatccaagtgagcgaaggctgttgctggcgctgggtcagtatagtcatccgctggcacatagatagcctggatagaggttacagaacccttcttggttgatgtgatacgttcttgcaattgacccatttccgtagcaagtgttggttggtaaccaacggctgatggcatacgacccaaaagggcagatacttctgaaccagcctgagtgaaacggaagatattatcgataaagagaagcacgtcttggccttccacatcacggaagtattcagcgattgtcaaaccagtaagggcaacacgcatacgtgctcctggtggctcattcatctgaccaaagaccatggctgttttctcgataacgcctgattctttcatttcccagtaaaggtcattcccctcacgagtacgttccccaacaccagcaaatactgaaataccaccgtgctcttgggcaatgttgtgaatcaattcttggattaagacagttttaccaactccggcaccaccgaaaagtccaactttaccacctttaaggtaaggggcaagaaggtcaataaccttgatccctgtttcaaggatttcagaagaggtagacaactcatcaaaagttggagcttttttatgaattggctgacgctctgcgtcttctgtaaaaggagcttccaagtcaatggtatctcccaaaacgttgaagacacgtcccaaagtttctttacctactggtacagagattggacgacctgtgtccaatacttccattccacgagtcaacccatctgttgattccatggcgatagtacgaaccataccatctcctaactccaaggctacttcaaggacgatttttgtttttctttcgtcatttttgtagacgacaagtgcattgttaatctcaggaagtttttcccctgctgcaaacaaaacgtctacaacgggaccgataacctgagcaattttacctgaactcatctccttctcctattctatataagatactgtcggttcctagctcaactaggtcctaagttcattttcatacgagctggactagagcctattctaaggcactagcacctgctacgatttctgtaatttcttgtgtaatcgccgcctgtctggcacggttatactgaattgtcaaatcattgatgactttcttagcattatctgtcgctgtttgcatggctgtcatgcccgcagcattctcagctgtcttggcatcgataatggcaccgtaaatcatactttctgcaaactgaggcaacaactgctccagaatttcttctcggctggtttccaattcaaaagtcaagctgtactcttcatccgcttcatttggatccaagtcaacaatcggaagcatttgttccacacgcatttgactggttagcgtattgacatggtggttgtagcaaacataaagctcatcaaagagttcattttggtacatttcaacagtttttgaaataatcttacgaacttgatcaaagctaggttggtctgacaagccacgtaattcataaagtggttgaataccgcgagccttaaagaaatcagctcccatcccaccgatacagatcatttcaaaacctttaccgtctgggtggtattcttctttcaactccataacagctttcaaaatagaggaattataacctccaaccaaaccgcggtctgaagtgataacgatatagcctgtcttcttcacagaacggctaatcaacatcggattagttgaagcaccagctccattaccatgaaggatatctgtcaaaagtttacgcactttctgagcgtaaacttggaagttgcgagcagcttcttcagaacgacctagcttagcagccgataccatttgcatggcattagtgatttgactcgtattttttgttgaggcgatttttgttttaatatcatttagagatactgccatctgacacctctattcttattggaagctagattgattgagaaactctgtaatcgcagcatccaagactgcttcttctggcaagtcttttgtatcacgaatggtttccaaaatctctggatgttgagcatcaaagaaggcatggaactcttcctcgaaacgaacaatatcatctactggaacagtatccaagaaaccatgtgtcaaagcataaagaatggttacttgtttctcaacaggtaatggtttgtgaacaggttgtttcaagacctcaacggtacgacgtccacggttcaacttagcctgtgttgctgcgtccaagtcagaaccaaacttagtaaaggcttccaactcacggtatgaagcaaggtcgatacgaagtgtaccagcaaccttcttcatggctttgatttgtgcagaaccacctacacgagatacagatgaacccgcatcgatggctggacgaatacctgcattgaagaggccatcgccaaggaagatttgtccatcagtgatagaaatcacgttggttgcgatataggctgagatatctcctgcttgtgtctcgataaatggtagggctgtaattgatccaccaccaagttcatcagaaactttagctgagcgctcaagcaaacggctgtggagatagaaaacatcccctgggaaggcttcacgacctggaggacgacgaagcaagagcgacagttcacgataagctaccgcttgttttgatagatcatcgtatacaatcaaaacatgcttaccttgatacataaattcttccgccatagcaaccccagcataaggagctaggaagagcaatggagatggttgtgaagcagaggctgtcacaacgattgtgtagtccaaggcaccgtactgacgaagtgtttctacttgcgtacgaactgttgattctttttgtccaatcgcgacgtagatacagatcatatcttgatctttttggttcaagattgtatcaatcgcaatggttgttttccctgtctgacggtcaccgataatcaactcacgttgaccacgaccaatcggtacaagggcgtcaatagctttcaaaccagtttgcaatggttctgaaacagacttacgttgcataacaccaggagctggtgcttctactggacgagttttatcagtgtggatttctccaagaccgtcaactggacgaccaagcggatccacaacacgaccaatcagactttcacctacagggacttccatgattttccctgtacggcggattgtatcgccttcacggatatctgtaaagtcacctaggatgataataccaacgtctgttgactccaagttttgagccataccataagagccgttttcaaaattcaacaactctccactcatgacattttcaaggccgtgagcacgcgcgataccgtccccgatataggttacaacacctgtttcagtcacatcaaaattgggtttgaaattttcaatttgttgcttaattaaagcgctgatttcttgtgcgttaattgccaaaagaacaccactttctatttcaaattttctttaacaactttaagttgttgtttaatactcacatcaattgtcttgtgattggcaaaaatgacaaaaccaccaatgagactttcatcgatttgttcttttacactccttactttcagagacatttttttctcaatcaaagggagcaaacgagtcttctgttcatcagttagaggatgagcagacgtaatcgtcacttcaaatcgatttgtttctttttcaagtcggttcaagcaatctacaagcacatcataaaaaagatttgctctgtgattgtaggccagaacctggataaagttttgtaataaaggcgacacagaatcttggaaaaaagcaattgttttttccttatccgactcgtctactgccacttgttttaaaaaagaaggcagacctgttttttcaacaacttgcttgatttgagtcaagtctgaaaagatacggtcttcttctcctttttcaagtaccaattggacaaaaggcatgctgtatttttcaattacctttactgttttcttgtccattaagcttctcctagctgatcgatatactgatcaatgagtgctttatgggcatgactgtcaaggttttgtgagatgattttaccagctaagctgatggtcaaatctgcgacctcacccttaacactctgtaaagcttctactttattttgagcaatttcttgattggctttttcttttaagtgtcctgcttctagtttagcatctgctaagatattagccttactttgctcagctgtttcctttgcattttcaatgattgtcttagcttctttacggctaccagccaattcatcttcgcgtttttgagccaatacttctgctttttgacgggcttcttcagctctgtcaatatctgaagcaattttttcagctctttcttcgaaaatgcctgtaatattagaccatgcaaattttttaatcaagactagcaaaagaataaaagagccagtgattaaaataaaattaccaattaattcacctactgttacgtgcatcagttactcctttctattcctcttcaatattaatcttattccctaaatacacagatgtcaaaagagtaaaaacataagcttggatgcaggaaataaagacagaaaatgcagtccaagccaaattagctccaaaggctactggataccaataaatagcttggtgggaaagaagaagtaacaaactcgtcatgacctctcctgcaaagatattcccaaaaatccgcaaagccaaagataagaagtttgtaaattcttccaagatattcatcggtatgacaaaaacaggactcataaaagattttatactttttttaaatccacgacgacgaacgctttctatatgtgtcaacaaaatgacaagaaaagataaggttaagtcatactgtaaattagcggttggcgaactccaccagttagtcccatcgatcgtttgaagctttgtcattaagccaaggttattggcaatcaccatgaaaaggaataaacaaaggaaaaagagtgagtaatctttcatgtagcgcgaaccaatgttaggttctgtaaatccaataacaaagtcatagacatactcaagtacattttgctttcctttgggtttcaaggtcatattgcggcttgcccaataaataaagacaaaaataactcccacaatcaacaaagtcatggctaacatagtcagattgaagataacaggaccaatagagatgattggattaatactttcttccatctaaaatcctcccttttcttctcgttccatgtatttatttgataataaatgagaagacaagagttacaaagaaagttccttcaataaaggcaacacctaaaaacatcaaactacgaaactcagaaagcatatctggttggcgtgctactgatttaaacagtccattcatcaataaaccttcaccgacagatacgcccatacaggcaatacataagcctaaaaatgttaaattcataacaaattctcctttaaaataaaatttacttacttagtgtagtcctaaaatttaaatttgtcaacttttaaccgctattggaagcgtttaataaaaattatttccattttgctaaatttcaagttcaagttagccatccagaagtcttctctgggtgacttgtagtccaagcattttttaggatagttgttaatccacttttcgatgaatgcgacttctttgggagtcattttcttggttcccttaggtaactatctacgaatgagcctgttgtgattctcattagttcccctttcccaagaggcataggggtgcgcataatagatgtgctcctcagaaaatatatcaaacaagcgattgaattccgttccattatctgccgtgatggaaagaatcttgtgttgttttaagatgagttttagagcctgattgaccacctcagcacttttatttggaatcaatcggatgatctgatgtctactctttcgatccgtcaagacaatcaagcagtagtttttcgatctcgtaagtagaaccgtatcaatctcataatgcccattctccaagcgaagattgatagcttcaggccgctgttcgatggattgaccagcaggtttaaagttggtgctagcctgtttcttaagcgcttttccttttctagggtaaagcaaatcctgcttgcttaaccccaattttccatgatgaatccaatagtaaatggttgaaattcccacgttaacccctttagccataaccatcatttcaggcgaaaatttttggttatgatagtggagaatcttttcctttagttccttggtcaagcttgatttcttgaccgagcgcttgcgattgttttcataagactgttgagcgtagtcggcagaataaacctctttgaagcgcccttttccaagacattgtcggactgtcccacgcttgatttcagtgtgatagtttgaggagcttttccaagtagagaggcaatttctctatttgattttccttcttttttccatctttcgattaagcgacggctatcgattgtcaaatgtttggcttttgtagtataattgtcttgcatctctgtgcctttcttgtgtttgtggttgaacaacaagtataacacagaggtgctttcttatgcctacaagagctttcattatttccattttcttttggatttcactctattctgaaaaacttgtgtatatttactgaagctagcaagtcttacctgtaaatttaatgaaagcaacacaaaatccgagaggggaatctcggattaatagatagagagtttttagtttaaataaattgtttaaaatatcaacaacatcacttcttttcttaacctgataagtcttgattcctaattttggggctacgattatattgtcctcaatatcgtctagaaagacacaatttctaggttataactggtatttatcgatagttactcatatacatcagtccacctccatacttatgtgcgagcctctctttgtattatacctccatactcaccttacagattcttttggtaataatatctttgcctaatgtagagacagtcttgcaaagaaaaaacttccttgtagccatgtttctgataaaagtccggtgcctggaactggtaagtattgacaaaggcaaaacaacaatttcgattcttagcttcactttctgcctgttgcaatagttttgaaccgattccttgccctcgcagttcctcttttacaaacaaatactcgatttctagccaatttccaaaagtctctgctatcaaacctgccaggagattgcccttttcatcttcgacataaagattaagtggctcactttcagcctcttctctttttgaacggttataaacacgaatcagattccctatttcttgcgatttatgtgattccttattttccaatctaaagtatagtgaaatgaaataaaacatgcgcaaatcgattaaggaatttaatctaatttctaacaatgtcttagaaatcaaagtgtactattttaacttcaatgcactatacatctaatactcaataaaaatcaaagagcaaactaggaaactagccgcaggttgctcaaaacactgttttgaggttgtagatagaactgacgaagtcagctcaaaacatagttttgaggttgtagatgaaactgacgaagtcggctcaaaacatggttttgaggttgtagatgaaactgacgaagtcagctcaaaacatagttttgaggttgtagatgaaactgacgaagttagctcaaaacactgttttgaggttgtagatgaaactgacaaagtcagtaaccatacatacggcaaggcgacgctgacgtggtttgaagagattttcgaagagtagcaaaatggaaaaaggagtgagtgaagcacatcgcctccccactcctttttctgtttttaggctgttttttcaaccttcaagatttttacatcatagctaccaacaggcgtttcaatggttgctgtatcacctgttttcttgccaatcaaggcctgcccaattgggctttcatttgaaaccttacctacaaaggcatctgcaccagctgaacctacgataatataaacttcttcttcgtcctcaccaatttcttggatggtgactgttttaccaatcgctacttcgtcctgggcaactgcgtcgctattgacgatttcagcatagcggatttttgtttctaagctagagatttgtccttcgacaaaggcttgttcatccttagctgcttcgtactcactgttttctgaaaggtcaccgtatgaacgggcaatcttaatgcgttctaccacttctggtcgacgaaccaatttcaattcttctaattctttttcaagtttttccttttcctcaagggtcataggatatgttttttctgccatttttctcaactttcttctgataatattttctaaagaaaattatgtgaagtatcacataattttagtttgtttagtttaatttgctgttgacatgttcagcgacattgcggtcgtggtcttcttgattgttagcatagtagaccttgccttctgtgacatctgctacaaagtagaggttatcgctcttagtttgattgatgcttgactcaatcgcatccagacttggactatcgactggaccaggcatgagacctacatttttataaacattataaggtgaatcaatgttggtatcaatcgcaacatcctcagctagactgatattttgccccagttttccttgggcatacaagattgcaatattactttgaagtggcatatcacgattcaaacgattgtagaatacacctgcaatgagcttacgatcttctgtcttggcaccttctttttcgaccaaggaagcaatggtcaacaactcattgacagtcaagtttttagatttgatagtactatagtaaggagataggttcttatccatagcagctaacatctcatcaatcaagctctcaatagttgtgctttccttgatagagtatgtagctgggaaaaggtatccttccaaacgataacgcgcaccgctgtcttttacaggcaaactttccagtaaagtaggatatttcgctactgcttgactgataaacgtctcatcttgaactttagccaagaaagcctccgctgtcaaagactctttgaagtcaccttgcaattgacccacagcttgagcaatctgatccaaggtataaccttctggaattgtcaaagtcgcaagtacaggttcttgcggttcatctgttccacctttttgcaactctttgagtaagtcttctgtactcatactcttttgcaaattgtagtaacctgctttcaagtcggtataatttttatacttggcataaaaactaaaaatcagaccatgctttaccaaaccagctttttcaagcgtcgtaccgatttcttgaacgtttgaaccttctggaattccaaccgtcacatatttcttagaattagcatcgataggtaataaggaatctagcacgtactggtaaccaaagtaaccacctgctgagagcaaggcaaggaatacaaggaatgaaatcacaaaagctttcacatgtgacttcttctctttcttaggcttaacgggttttgctccttctctacggctacgacgtgatgtatctctgatgatatccactgtttctgtagcaggcgtaggtgtttctggacctgcttgttctgcttttttctctgccgtcgtataggaaacagctacccttgttggggtttcattgtattctctttcaagtttcttaggtctaacaggacctggacctggtcttgatccactttcttccgctggagaagaaggtacatcttgacttggatgacttggaacaccaggagtttctctttgaatctcatctgctggagaagctggtacaccttgacttgggtgagtaggcacggtaggagcttttctcataatctcctctaccgttgacaaggaatcagccatgagttcttcagttgaaggttcatttgcaggagtgcgaactactgcctcatcttctttcagaacttcatcatagccttttactttttctaaatctctcagaatctgctctttaaagcttaatttctcttcttctcttgacttttcactcaaaagtttttcctccttgttgataatccataatattatatcttaaaagtccaaaaaaagcaatctatgatacttttcctaacttattttttcatttcccagaccatatcataccatgtttcccctgcaaaggttgactgggactggccttcgttgacaaatccatgtttttcatagtaggcgatgagatagtcatgacaggttagattaatgccatctctctcatcttcaagagcaacttctttcaaggctgtcagcaatttctggcccagtccgagtccctgtgcctccttggcaatagacagacaggtcacagagatataaccaccaggctcatgactatagtcttttatttcttctgtaaaagactggtcttgcagatggcggtgcaggccaactggtccttcgatataacccatgattcttccttctttttcagcaaccagaaaagaggtctgaatttctctcaaatgtgcttcaaagacagaaggaggaatggcttcttcgaccgaaaaattttcaaattcaagttcaacaatccgatccaaatcttctaatcttgcttgtctgattttcattgttcctccagataaaagggattaaaccaaatcatactatagccctggctagttgcatagagcaaagttgcttcttcatcaacaaaaccgttcatttcaaaataggaaagcagctcatcaggactctccaaacgaatccctttgtaatccagctcaactgccacctctttcaaggctgcaagaagaagtgttcccaggccctgtctctgatggtcaaactcgatgactaaagaatgtacttttagacattgcggattgtctgactggggacttgataaaatatagcctaaaagttgattttcatccctagctagaagaaaggtatccgcacacttacggatactttcttctaaaatatgggaaagttgctgcttttcagctggaaaagacgaggtctgaagtgcccctatctcaggcaaatcagacttgcttgcctgaatgatcttaattggaatttccatgggaacatcctattgaacattgcttgtcaagttagacaagagacgctcaaatgagtattcataggtttggatgtctcctgctcccataaagacgtaaacagcattgtcatggtctaggagtggagaaacattttcaacagtaatcacttggtgttttttgttgattttgttggctaggtcttctaccttaacgtcaccatgatctacttcacgagccgagccataaatttgcgctagataaacagcatctgcttggtttaaagcatgggcaaagtcgtccaacaaggcaatggttcttgtaaaggtatgcggttgaaagactgctacaatttccttgcttgggtatttctgacgagccgcatccaaggtcgcaataatttctgttggatggtgggcaaagtcatcgataatcactgtatcattgacaattttctcagtgaaacgacgtttaacaccggcaaatgttttcaagtgctcacgcaccaagttcaaatcaaatcctgctgtgtaaagaagaccaataacggctgtcgcattcatgatattgtgacgaccaaaggttggaatgtggaattgccccaagttttgtccacggaaatgaacggtgaaggttgaaccagttattgaacgaagaagatcactagctacaaagtcattgccttcagcttcaaaaccataataataaattggtgcatcagacgtaatcttacgcaattcagcatcttcaccatagacaaaaagacccttggtgatttgtttggcatagtcgttaaaggcattaaaaacatcctcgagacttgtgaaataatctggatggtcaaagtcaatgttggtgataatagagtattctgggtggtaaggcatgaagtgacgctcatattcgtcagattcaaagacaaaatatttggcattggccgaaccacgacctgtcccatctccaatcaagaagctggtatctgtaatgtgagacaagacatgagacaacatacctgtcgttgaagtttttccatgtgctcctgctactcccatgctaacaaagtcacgcataaagctacctagaaactcatggtaacgtttgtagctgataccattttggtccgcataggcaatttcgacgttgttatctggacgaaaggcatttccagcgataatttccatatcaccgtctagatttttttcatcaaaaggaagaatggtaattcctgcctgctcaagaccgcgttgggtaaagtagtacttttcaacatctgatccctgaaccttgtgccccatctggtgcaacatcaaggccaaggcactcatccctgatcccttaattccgataaaatgatatgtctttgacatgttttctcccctattctgtcattctggtcagattcaactcttgggcaacccgacgttcttgttctgtttgtttactttttttattgtagatttggctcttctttagaaaatcataattgtttttctttggagcaggtgctgacacttcttcattcttggtagggatagaatgaacttcttccgccaagatataatgagactgggtcaatttttggctatatttgacaaattcaccaggattttccttttggaaaggagctgtcggttgattgccctgtctaactagactgggctgagaatgacgtctcgcaaggctgaaatcctgagttaggtagttagcagagcgtttctttttcaagtccgcacgcgcttcttcacgcgccacctccgcatagctctttccttcttttttaacccctaaaggagcctttttaggtttttcgacttgcttttcaatcggttttactggtttttcttcagcaataggagcccattctaaataatttttatctcgatactcacccttgatattactgatcagatcagactcatcatagagattcatgactggcatttcagtcaacatgacctcgtcatctgacaccaatggaaatcgttcttgtttcattttctatttcctttcaacacttcattatagcgtattgtcttgatttttcaagtgctggcttcagaaattcccaaaatttctctaatttctgctagggtcagactaccacgtgactctgtgccgtccaatacttgtgacaccagatgtttcttttgttcttggagttcctgaattttttcttcaatggttcccttggtcaccaagcgatagacctcaaccgtttcttcctgacccatccgatgggcacggccaatggcttgcgcttccaccgcaggattccaccaaaggtcaaccaagatcactgtatctgcacctgtcaggttcagaccgaccccaccagccttgagggaaatcagaaaggcatctctttctccttggttaaaggccttggtcatgtcttgtctttccttggctggggttgaacccgtaattttaaaggaagtcaggcccaagtctggcagttcttgttcaattttttccaacattcccttgaactgagagaaaatcaagacacggtgtccgccgtctgccacctgtaccagtaggtctcggagactatctagtttgccgctggctccctgataatcttccataaacagggcaggagtgtcacatatttgacgcaagcgcatcaaaccagataaaatttccacacgacttcgctgaaattcctgttctgacacttgagccagatggtctcgcatctgttgtaactgggcaaggtaaatagccttttgctggtcttccagttcatttttataaaccacctcaatcaagtctggcaattcagtcagaacttcttctttcttgcgtcgcatcacgaaaggcttgataaactgagccactcgctctgctggcaatttcataaattctttcttgcttggcaaaagtccaggcatgacgatttggaaaatagaccacaactcacccagatggttttcaatcggagttcctgacaaggcaaagaccgacggcaccacaaattgtctcaaggtctgggcaatcttggtctgggcatttttcatgacctgagcctcatctaagaaaaggaagtcaaaggccatcccttgataaaactcactgtcctgacggaaggtggcatagctagtcacatagatttgatggctctcggcaagaatctcctcacgacttgctttcaaaccatgaacaacagtcacatccaactgtggagcaaatttctgaaactcatctgcccagttgtaaatcaaacccgacggagcgagaatcaaaacccgactttcttttgtcacttgactagtcaaaaaagcaatggtctgaagggttttcccaagtcccatatcatcagccaaaatcccaccaaaaccataatgatggagcatctgcaaccagccaattcccttttcctgataatctcgcaagtcagccttgacctgagttgcttgcaaaggaaagtcctctggatgcgtcaaatcctgggccagattctggaattcttgtgaaaaagaaacacggtctcgcccttcaaagagatgagctaaactgtaggccaaggatttccgagcctgcaaggtcccatcttttaattcaaattgccccagttcctgtagattttggcgaattttcttggtttcttcatcgaaaaagtaaacttgattagacgaatcaatataaaaatcctgattggcaaccaaggcctgcatggcttggtcgatttcctcctggacaatattttgaaaatcaaactggatttccaagagacctcccttggaggcaatctgcacctgaggactcgctaggctataaagctcttctagtttatctgataggtcaacatgcccgagtttttcaaagactggaatgatatcatgaaaaaaatgatagacagactccgcttttaaggcctgacgccaagattgaaaatcggcctcaaagcccgcagccaaacagacttggaaaattctttcttctaagtctgcgtcacttgaaaagggtaattcttctagctcttgtcggctagatacctgtctatttccataatcaaactgaatttctaaacgaatccgattatcttcttccctgtcaaagtaaaaagagggcgcaaaagttttgatttgtagacgttctggagctgaaacggtgcccatctggataaaaagagtcagacaggaggccaatttgtctcgatcactgctatcaaattgcaggtatttctttccttgttgacccacaggtaacgctttaatttccttgagaagacgcatctgctggtctgttaaaaaataaacctgacctttatggaaaagtactgctccctgataaaagacattgaccctaggactctcactgatttccatttcaaaataatccgagtattctgttactgtaaaggcaaatagattggcatcagcatgcatatcctgaaaaagcagggtttggtagctatccacttgatggtcaaattgaaaatggggcaaggccatcagtaaattcacaccctgctcaaaaaaggtcagagggaaaaagaggtgccgaccttggttttggaaaaagaggtctggaaccagcccttcctccgttagtccgtgcaagaaagtcaaaagttcttggctggcatcatcaaaggcttcccaagaaagagactcctcataaatcttgccaatcatatacgactttctctgctcgacaatccttaaaaaaagtggaatatcccgaatgacatagtatttttggctattgatttggccgattctcagagtccacaagatatgattggttcctgcttccacctgacccacagctgataactcataggcgcattctgattttggagataaaattcgatccaaaaacttgccacccaaggtcaccttggtttcaacagcctctttttcttcatgaccttcttccagactccacaagatttcctgaccacgctcatcatttttcagaaaatgctctagcgctgccaaatgcacacagtagcccctcttttgaaaaaaatcacaggcacaaaaaaccaaatcatcctctaaactatagcgcagttcttcttctgcaacgcgagcgtagagccgattgttcttttccttgatgatatcaaccttaccagtttcataaagggcaacaccttcgatacgaattttccccggaatcaatttagccatattttcacctttaccttatctttttattataccatattttcgcctatgaaaatagccttctaggaagacttttctcctagaaggctggatttttaacgtttggcaaaagtagccacaatccgctgacagacttcttgcaacagagatttgggcatagctatattgatgcgggcatggagacttccttcctctccaaaatccaaaccacggttgaggataaccttggcttcatttctcaacaactcttgcaatgtttcatcagtcaggtcataagctgaaaagtcaagccaaatcaagtaggtaccttgcggtttcatgaccttgattttagtctcttttccaaatagatccatcacataattgatgtggtcttcaaagacttgcttgagttcctctagccaatctttaccgtatcgataggcagcttctgtcgccaaataacccaagcctgaaatttcatgctgattattggccaacaggcgtttctggaaagccagtctcaacttaggattttcaatgactgcataggaattttttgttccagcaatattaaatgttttagtggcactgctcaagacgatagcaaaatttttgaaggcaggattgatggtattgaaagactggtgtttgtgaccaaagagggtcaaatcttggtgaatctcatccgaaactaacaaaacaccgtgtttttggcagagttggccaatcttctccaacacttctttttcccaaacacgtccaccaggattgtgagggttgcaaagaacatagagtttaacctcctcttccaccaaatccttttcaagttggtcaaagtcaatctcaaacagactatccttttccactaaggaattagtaatcaatctacgattattcaacttgacactgcgagcaaagggtgggtagacaggcgtgttaattaaaaccgcctcgccttcttttgtaaaggtttgaatagctgttgagatggctggtaccacaccctcgataaagacaagagcctctttgtcaaagttgtaaccgtattgtgtagcttcccacttttgaacttccttaattaagtcttcactggcataggtataaccataaaccagttggtctgcgtaagtttgcacggcttggcggatttcaggcaagaccacaaagtccatatccgctatccaagctggtagaacttcactatccgtttctgtttctttccatttataggtatggtgccctaaacggttgggcaggcttgtaaaatcatattttcccatctttgtcttatccttctatggcttggcgcaaatctgcaatcaaatctctagcatcctcaatcccaatagacaaacgcaagaggtcatctgtcaaaccataagaatggcgtacctctgctggaatatcagcatgagtttgagtcgttggataagtaataagactttccactccacccaaactttccgcaaaagagaagaccttgagactgttcaaaatatgaggaatgcgtgtttcatcggctactttaaaggaaatcatgcctccacgaccagtgtagagaacttccttaactgctggagaatccttcaaaaaggcaaccacttcttgggcgttagctgttgagcgctccatacgaagagacaaggtcttgagaccacgaagcaactggtagctgtcaaatggagacaagactgcccctgttgtattaagattgtaaaaaagcttctcgtatagttctaaactattggtcacaaccactccagccaagacatcattgtggcctgctagatacttggttgctgaatggagaacgatatctgctccatcttcaatcggacgttggtagatagggctatagaaggtattgtccaccaccactttggcacccttagcatgagccaattttgctagtttttcgatatcaaattccaacatcaagggattggttggggtttcgatatagagaacatccacatccttttctaactcggcaatcaactcttcttctgtattggcataggtaaaatggaaatgaccttcctgctccacttggttaaaccagcgaaaagaaccaccgtaaagatcacgcactgccaagaccttacttcctactggaaagacgctaaaggccagtacaatagctgacatccctgagctagtcgctagggcatagtctgctgactcaatagccgccaagacttcctcagccttactacgagttggatttttagtgcgcgtatagtcaaacccagtagatcgaccaaactctggatgctgataggtcgttgaaaaatgaagtggtgtcaccaaagcacctgttgcctcatcagacttgatccctgcttgtgctaaaattgtgttaatgtgtaattccttgctcatacaattcctccaaatctatagtaactattgtaccacttattttgtatccttcgttttcttgttttcaagagctagttatagtttcaaactatataaaaagggagtttttcctgctccctttaatagactataaaatggtgaatctcaaaagacaccttcactctatcatttgctcctgcacaaaacgagcataacgctcatgattttccagtagttccttatgagttcctgagccagtgattttcccctcctctaagaagaaaatacaatccacatcttttaccgttgacaaacgatgcgctataatcacaaccgtcttctcctttagtacagaatagaggctactgataatcgcatactcagaatccgcatcaagattagcagtggcttcatcaaatataagaatttcagcatcttttaagtaggctctagctatttgaagtctttcgttcgcccccctgacaagagtcgtccgcgttcaccaacttcagtatctagtccctctttcatggagcgaatctcatcacctagtgatactaagtctagcactttcatcaattcatcatcagttactaagcgattcaaaccgagacaaagattgtcacgaatactgccagataagactgcattattttgtgaaacccaagcgattttacttctccattcttttaagttaaaatcatatatacttgattgctccattagaatatctcctgaaagcggtttataaaaccgctctaacaaacgcacaatcgttgattttcctgatccagatggtccaacaaaagcaattttttgccccttgaaaattgaacaagtaatatcctttaagacaggtcgattttcatcataaccaaaatagacatggttaaaattcaaccctcgtcctgataccgattttcctccctcaaatttttctttaggaactgcaagcaagttctccagtgcaactgaagatcccttgctcctagaataaacagttacaaaattagctatattactaataggattaagtaattgaaagaggtaaatcaaaaacgaaaccaaggttcccacagatatatatcctgcgctgacccgataacccccataggttagcatcacagctatagtcgcaaagataaataagagagcaaacggggtctcaaaagaagtaaccctatctgatttcagtgaattgttttgtaccctttcaatacaattatccaaaacatcctgtacacttttctctgcttggttagtcttaattaattcatgttcttgaatcttttcagtcaattgccctgttaaatttcctcctgtaaacgacgactatacttttcactgatattggaaaggggcaagataataaacatcatacaaggaagagtgatgaataaaagtagagaaagattccaatcaagactaaataagactacaatggaaccaagtaccataactaaactcagaataatatttgggaaagtcgtaattaaaaactcacgaatgacactcgtgtcattgacaatggcagaagtcaactccccactttggctcttatcaaagaaggatttctctacataaatcaacccctctatcacttttttcctgatttttgctatctttttttcacccgattgactaaacagatagtaaccaatagaagaaaacaaggcttgaccaataaaaatcaaaaacgattgaaatactttggagcctatattttcaatagaactcccatctattaaatcctttaagataaggggaagcaacaaagcaagtagactagacagaacaagtaagaaactccccataatcaccttagtatctactcttaataattttaatttcataaatactccttataatatttcaacggataaagtcgggaataactcaatttgaggataaaatctaataaatcttcctataacaaaacgcataacatctaggattttatatacctgatattatgcgtttttaagcacaaagacttcttacacaaacttatctacaattagattttatttgacatgttttgccaattcttcttgggcttttttattggattcttctttttctttcaaccatttttctctggcttttgcatattcgtctgttgtgacaatcttatcttgtactttgaggtatttatatgattcaaccccttttgtaccggttaaaccataggcagcagcaaatggtacggttcttctcaatgatggtgttcccccacgcgaaacacttggaagaactaaagaactatcaatcaaccaagcttgaatatcagcatatttctcataacgtttggccggatcttgctctttattagcttcttccaacatttgagtatagacatccagtccaactgccttagccttgtcattggcctcaccaggctctagtccaagattttgcagaaatcctccactattagtattaaaaatatcgagataggttgacgggtcttgataatcaggtccccaaccgccatgatataaatcataatctttctgagcagctgtttgagcaaagtagcctgaactgtcaaactcatctgatgttaattgctgaatgtcaatcactacattatcagaacctaaaacagattcaattgattgtttgatagaactaactccttgtatgcctactttatctgttacttccacagtcttatccaagtggattgggaattgaacaccctttgcttcgagttctttcttagcttccgcaaacttagccttggctttctcaggattgtagtaagggtcttgaccatccgcaaagttgataccttgccattccttaccatagttgaccatcttagaggctacaacttcaccaaagtcttttcccttgatactgacaaagtttggaggaaccactaggttacgcaaaatctttgttgcaccttctttcccttcagactgagccccataagatgttctgtcaaaagcaaaattgatagcctgacggaagtttttattgagaactgcttcctgagtcgatttcttttcaatgtcacttgttttagaagtataattgtaagacttcctatctaggttaaaattaaagaaatatgaagttgaattttgcatactatagatgatattgtttttgtatttttctttaatcccttcatagctggagctgttaggaaaaagacgagccgtagtataagcaccagctgtaaaattacgttccagtgattcttggtcgctaccatcatagtaggtcaatttcacatcgtctacaaagacattcttagcatcccagtaattagggtttttcttatattcaatagcagattttgagacaagtgctttcatcaagaaaggtccattgtacaaaatactagatggatccgccttcccaaaatcatccccttttgatttcaggaaatctgcattaacaggaaaaagtatcgttgcaagtgtttttgaattccagtaaagttctggtttaaccaaagtatattgaaccgtttggtcatcaagtgccttgacaccgacagttgaaaagtcgcttgttttaccagtgatatagtcatccaaaccagcaacagagtcctgcactagatacaaggcttctgattttttatcagctgcatattgcaaacctgtcacaaaatcctgggcagttacaggcgcatattcttctccctcagaagtaaaccacttggcatccttacgaagtttgtaggtataggtcaaaccgtcctgagaaacagtccaatcctctgctaatgatggaataatattcccatattggtcattttctaataacccgtctaccaaatttgcaacaatatcggatgttgctgcgcggttttctgctagatagttcaagctagatggatcacttgaataaacatagttgtaggtttttgacgccgtgctagaatttccacacgcgctcaataaaactcctgtacccaggacaagacctgccaaggttagatatttgctcttagactttttcatttccggaacctcctgctttaaatatttgttttattatacaactcttggtttgtttagtcaattgttttttccaaaaaatcaaaaaaacctcattttctatttttgaaagataattttagctatttttacgctaaaaaaggaataagtttcaagttctcctaaaagattgttcaacttattccttttatttataaatgctaccttacgaaagcttaaattttgctcgcaggcgatctgcttgggcttttcctattaccttatctaataaataggtacgcagactcataaccatataaagtccaccccccatggcaccgacaagagctacataaaagaagctccacaaacgtccacttggttggaagaaaaatcctaacagccactggatggttcctattaacagaaacatgactagggtcagcaaactgattaaaatggttcgcttcaaaatcaccttgcgcttgacaccagttactttacaaatatcccgatacatcaagacgttaggaatgatgagagcaatggttgttgaaatcaaaggaccataactgtggaagagggcgatggtaggtagttgcaagactagcttggcaatagaaccatagataaaatagagaacggccttgcggttgcggaacatggcctgaagcattggagacaagaccatgtacaagcctaaaataatagactgcaaaactgcaaagacaaataagcccagagccaaactatctggcttaccatagaagaccgtataaagaggttctcctaccataaccactccaaccgttgctggtagcaagaacataaagagtagggtgagactgtcctgaacgagacgagaagctgctttcaagtcccccttgacatagttttccgtcaaaagtggcaaaccaacactcccaatcgaaacccctacagaaatcaaaatcatcgtgattttattaggattggctgagaaataagaaaacatgacaaccaagtcctcattgctgtagttggtaaaccagctcatactattgataaaggtcagctgatccaaaatctggaagagctggatggcagaccctgtcaggataaaaggaatggcttccttaatggtatcaaccaagagacgcttactgttaatcttatctcctgtttcaaagattcttttgagtgaaccttcttgggcaaggaaataaatcaagactgcaaaactggctaccataccgacaaaggcagcaaaggttgattgggtaacggctgctagataatctcctgaaccgagcttcataatgataaaggttgctaggagcatccagataacacgaatgacctgctcagcaatttggctcatggcatagggtttgaggttattcatcccttggaaaaatcctcggataacactcatagacgggaaaatcaagactccccaagccaagctttgcatgattgggatcaagtctttgcccacgccagacaagtctgctagccaaggagcaaagacatacaagactaaagcaaaaaccaggcctagtcctgtcataaagcctaagaagctccgaatcagggcaaagctatgctcttcttctcgcatggtattatacttggcaacttgcttggccaccgcaactggaatccccgctgttgaaaccaacaagaaccaagcatagatattgtaacccatggtaaagagaccatttgccttagctgcataagcccccatccagatgtaccaagggataatgtaaacagccccgagtaggcgactgataaagttactagccgttagccaagcagtcccccgtaacatctgggcctgctggtgattgttttcgtgcgacatagattcctcattcaattttgataactaggaaaaactccttatcttccattataaacttttccttgttacttgtaaatttacgactttcggtttacaatagaaagtatgattaagattgaaaccgtattagatattttaaagaaagatggcctttttcgcgaaattattgaccaaggtcattaccactacaactacagcaaagttatttttgatagcatcagctacgacagccgaaaagtaacagaagacactctttttttcgcaaaaggcgctgcctttaaaaaagaataccttctttctgctataacacaaggattagcttggtatgtagctgaaaaggactacgaagtcggtatccctgtcatcattgtgaacgatataaagaaagccatgagtttgattgccatggagttctatggtaatccacaggaaaaactcaaactccttgcctttactggtactaagggtaagacaacagcagcctatttcgcctataacatcttatctcaagggcatagacctgctatgttgtcgaccatgaacacaactcttgatggcgagactttctttaagtcagcgttgacaacccctgagagtattgacctctttgacatgatgaatcaggctgtgcaaaatgaccgtacccacctcatcatggaagtctccagtcaagcctatctggtcaaacgtgtctatggtctaacctttgatgtgggagttttcctaaatatcagcccagaccatatcggcccgattgaacaccctagctttgaagactatttctaccacaagcgtctcttgatggaaaagagccgagcagtcatcattaacagtgacatggaccacttctcagtcttgaaagaacaggttgaagatcaagaccatgatttctatggtagccaatttgataaccaaatcgagaattccaaagcctttagcttttcagctacgggtaaactcgctggagattatgatattcaactcattggcaacttcaaccaagaaaatgcagttgctgctggacttgcttgtctccgtctcggagcaagtcttgaggacatcaaaaaaggcatcgctgcaacccgcgttcctggtcgtatggaagtcctcactcagaaaaatggagccaaggtcttcatcgactatgcccacaatggggatagtctgaaaaaactcatcaatgtggttgaaactcatcaaaccggaaagattgctctggttctgggatcaacaggaaacaagggagaaagtcgtcgtaaggactttggcctcctcctcaatcaacaccctgagattcaagtctttctgactgctgatgaccctaactatgaagacccaatggccattgcagatgaaattagtagctacatcaatcatcctgttgaaaagattgcggatcgccaagaagccatcaaggcggcaatggctatcacaaatcacgaattagatgcagttattattgcgggtaagggagccgattgttaccaaatcatccagggcaagaaagaatcctacccaggagatacagccgtcgcagaaaattatttataagaatagaaaaaatcaagggaaaatgaaacccttgattttttcctattctttagtaaaaacgtttttcaaaccttcaacggcaccttctacagcaccttttgcgtcttctacaacgtcttttgccttagcaactgttttttcaacagctccttcaagttctgtcttgctgtctccagtaactttaccaaaaccttctttgacagcgcctgttgcttgttccaatttgttttcaagtgacatatgattgtctcctttagtttattccgatatgtgttaccggttacatatagtttataccgaatactaaggaaagtcaaacaatgtactcagaaacaagaaatcacgctaagtagaaagttaacctctccttatcaaaatcgatagccaactcatactttccatcttcattttgcacaatatagcctaagacaacctaactgtccacaaagatatcacggcatttctgcataagctggtcttttttgagaaatttcaacaaaaaagccgtcatatacttgagggcatactcaggattaacatctcctaaaatgtcatagagctcctgctgtttttctgtcaaaggatactgctgtttgaccttgtaaaaataattggacagggtcattttaatgcgcgcaaagtccgtcttttcaactaaaatagctgcattgatttgattgcgcaattccgtctcaaaactctgctccaacaaggcttgatagaccggactagcttctctgacaaaaatctcttgatccagttcaagactatcaagtgattcaagcgtaggaaaattgaggtaatagcgcttattttcacgtagaatcaagcctgcctttatatactcttccatgagtttatcaactgcaacatctggaaattgagccttaatttcccgtagaatcacatcctcatactgatccagatagcggatcaattctccaaaaatggctgtctcgtcaaacgagatggattaaaaatctgaatcatgaagattcctttctttacattgtaacagaggcgatgctgccaactgactaggattggtaccagcttggttcagaggaacaggcagacctagttctatgtaatactccctccaaaaatcactaatctcctgctccccatctccaaatttcataggaatagtttcaaaaataggtaggatttctgctatatactgggagcagtaaaaaccagctgcatctggatagaaagaagcattgtagggtgctccaagatgtttgcaagctctttccttcaccgactggatatccatttctgggtaaacatagaggtcgtataaatgattggactcaaagaagtctgccggttcttgacagacaacaccagcctgtccactagcatgataaatcatcccatccaaataaatggcaacatggctatagttacctgtggaagtctggatggcctgtcccatgtctgacccatctctcacaaaaatcaaatcgccattttctaacatacttcactcctagaaaaaaggagccgaaactccttgcgatataaggcaaactagactttccgattttgagctgacacccaaaatcttacgcattaaagctttcagtcaattgaggtaccacttgtttcttacgtgaaacggcaccagcaaggaaggcatgattgttttcaagtttgaagttgaaagccgcttcgaccttgtccatattggcaccaagagccaagatttctgagtttgagttgacgatatctgtaatcatcaagacaaagtcagagtagccgtttgattcgttggcagcttgcattgcagcttcaatttctgcttggcgttccaaaacttcagcgatgtcaactgtgttcacttgggcaacacggacattatttccgttgagttcaaaagtcttagcatcgatatcaatcaattcttcagcagatttgctagccaagttggtaccagctttcaacattgccaaaccatattcttccaagttcacaccagccaattcagccaattcaggagcaatgattttatctgttgggtgtgttgttggtgatttcaaaagaagggtatctgaaatcaaacctgaaagcatcaaacctgcaatctctttaggcacagctacaccatgttctttgaacatacggtaaacgattgaagacgctgatccaactggctccaaacgcatgtaaagtgggcttgcagtttcaaagttagccacacggtggtggtctacaacaccgtaaacttctacttcagcgatatctgatacagattgttggaattcattgtggtcagtcaagataacttgctctgccccctctgctttggcagaagtgataacacgtggtgcttccacaccaaaatagttcaagacaaaggctgtttcttcatttggagttccaagggcaacagcttccgtatccaaaccgtaagcttcttttgcaaggtaggcaaaagctacagatgatccgatggcatctgagtctggattttggtgaccaaatactagaatcttggacatgataatacctcattttgtttattttctttattgtagcatttttttcgctttttgacaaaggtaagaggagtcaaaggactccccacgattcttcaaaataactgagtaaatttctatcttgattttcagataaaaattcttccttctgtggcctcttcttacgcttgagaagagcttcagccgacatggcttcttccttactggcaaaaccttgagcatagataagtttgactggcaagcgtgctcgtgtatatttggctcccttcccactattgtggatagcgaggcgtcttctcatatcagtcgtatagcctatatagtaggatccatcacgacactccagaacgtacatataagccttatgatccataataaatctcttcgatttcgggcgtataagagccatcatcattgtggacaatcaaaggaggtaagaccttaaagccacttgttgagccatccttgatcgcctcaatcaaaagcatattggcttccttttctctttttggataaacaaactgcaggcgcttaggggctagattatgtcgttttaacgtatccaaaatatccagaagtcgatcaggacgatgaaccatggccaaacgcccattagacttgagaatactctgggcactacgacagatttcttccaaattagtcgtgatttcgtgtcgagccaagagataatgttcactctcgttcagattagaataaggattcaccttgaaatagggtggattacacaaaatcatatccaccttactcccctgaatgtgagcaggcatatttttcaaatcatcgcagatgacctgcatttgctcctctaatccattcaaacggacagagcgttcagccatatccgccaaacgctcctgaatctcaacagacaatatctgtgcttgagtacgagtgctagcaaaaagccccactgctccattcccagcacagaaatccacaatcaaccccttcttaggaaaacgtggaaatcgtgataagagaacactatccaccgaatagctaaaaacctctctattttgaatgattttgatatctgtcgaaaagagctggttaatgcgctctcctgattttaataattgttcttcttccatggtcctattatagcaaattcatattaacattacaaaaaatataaaactctaaactacttcttcttttttaaatggtgcagggcttctccagtccagattggtagcattcgtcgaaagggagcaaagccgtagttaaagcggtcgcttgaaaagcgtctccgtctaggaaactggtacttttcttcctccaaagtgcggatagaaagactggctttccctgtaaattcatctaaatccactacctgaacttgaacctcttcatcgactttcaaggtttcatgaatattttcaataaatcctgtccgaatctctgaaatgtgaatcagccccgtatcacccgtctctaactcaacaaaggcaccgtagggctgaatccctgtaatacgcccctttagcttatcaccgattttcatcttagtcctcgatttcaatagtttcaattacaacatcttcaactggcttgtccatagctcctgtctcaacagcagcaatggcatccaagacagcgtaagatgcttcatcagctaactgaccaaaaaccgtgtgacggcggtctaggtgaggtgtcccaccttgattggcatagatttctgcaatcggttctggccaaccaccacgagtaatttctttcttagaataaggtaggtgttggttttgcacgataaagaactggctgccgttggtatttggaccagcatttgccatggaaagagcaccacggatattgtaaagctcttctgagaattcatcctcaaaagattcgccgtagattgactcgccacccataccagttccagttgggtctccaccttggatcataaagtccttgataatacggtggaaaatgacaccatcatagtagccatcttttgaaagagatacaaagttagccactgttttaggagcatgttcagggaaaagcttgatacgtaagtctccgtgattggtcttaatagtcgcaagaggaccttctactgtttcaatgtctacttgtggaaaatgcaattctttttctaccataccaaatacttctaaggcagcaaaaatgccatcttcttctaatgtttttgtaatataatctgctttttctttgattttatcatgagaaattcccatggcaacgctgattccagcataatcaaagagttccaagtcgttgagaccatctccaaaaaccatgaccttctctggtttcaagccaaggtgttccacaaccttttccacccccgtcgctttggagcctgaaatcggcacaatatcagacgaatgttgatgccaacgaaccatgcgaagtttgtctgagagactgtcaggcaagtgcaagtcatctcccttatcttcaaaagtccacatctgatagatatcttctttttcatggaaatcgggatctacatctaagtcgggataaattggattgatagcttcactcatcatatcggtgcgagtcgacaacttggcatcatgactcccaaccaagccatactcaattccttcttgcttagcccaagagatatactcctcaacatctgacttttcaatctgatgctgataaatgacctgaccttttttatcttcgatataagccccattcaaagttacaaaaaagtcaggcttgagatcacgaatctctggaacaacaccaaaaatgccacgtccagaggcgattcctgttaaaattcctttttcacgcaactgtttaaaaacagtgggaattgtagttggaataaaccctgtctttgaattccgcaatgtatcatcaatatcaaaaaagacaatcttgatcttctttgccttgtatcttaatttcgcgtccatctcactacctctttcaatctaactctttccattatatcataaagtaggcaaatcccctattttcaaaaagtttatcatttttattttaatttcttggatgagaaaagagacatatttatgaaaaagctccatcgtgcttttaatgtgttctcttgttttcaaactcgtaaaaagggagccactgatcctaactcgctctctcatttcaaagcttgtgaaaaaagacccgttggggtcttaattcgctttcttgttttcaagctcatgaaaaagagacccaactgggtcttttctttaatcttcgtttacgaaaggcatcaaagccattacgcgagcgcgtttgatagctgttgttactttacgttggtttttagctgaagttcctgttacacgacgaggaaggattttcccacgttctgaaacgaaacggctaagaagctcagtatctttgtaatcaacatattcaattttgtttgctgcgatgtaatcaacttttttacggcgtttgaatccgccacgacgttgttgagccatgttttttctcctttataagtttagttgtccattagaatggtaaatcatcatctgaaatatccaatgggtttgttgctccaaatggattttcattacgtgaaaagtctggtactgaatttgtaggtgctgaatagtttgcagttggtgcagagtaagctccacctgtgtgaccctcacgcacactacggctttccaacatttggaaattctcagccacgacctctgtcacgtagacacgttgtccttgctggttatcgtaactacgagtctggatacgacctgtcaccccgataagtgagccttttttagcccagttagcaagattttcagcctgttggcgccacataacgacattgataaaatcagcctcacgttcaccattttgactcttaaatgtacggtttactgcaagagtaaaagtcgcaactgctacatttgatggggtataacgcaactcagcgtcacgtgtcatacgccctacaagtacaacattgttaatcatagtttaccttcttacgcgtcaattttgacgatcatgtgacgaagaatgtcagcgttgatttttgaaagacggtcaaactctttaagagctgcatcgtcatttgcttcaacgttaacgatgtggtaaagtccttcacggaaatcttggatttcgtatgcaagacgacgtttttcccaagtttttgattcaacaacagttgcaccgttgtcagtcaaaatagagtcaaaacgtgctaccaaagcgtttttagcttcttcttcaatgtttggacgaatgatataaagaatttcgtatttagccattgatatgttcctccttttggtctaatgaccccaagactttgcaaggggtaagtgaggttcgctcacaataaactattatactagaaaaaatttttttacgcaagtaaaaacactagaattcgaaaaaacgccacatgggcgttttcctgttcttatggtttgatacggtgcaacatacgtgggaatggaatagcttcacggatatgttttgttcctgctgcgaaggttaccatacgttcgataccgataccaaatcctccgtgtggaactgtaccgtatttacgaaggtcaaggtagaattcatattctgtacgatccatgccaagttcatccatcttagcgacaagggcatcgtaatcttcctcacgcatagacccaccgataatttctccatagccttctggagcaagcaagtctgcacaaagcacgcgctctggatttccaggaactggtttcatgtagaaggccttgatggctgctggatagttcatgacaaatgttggcacaccaaagtggtttgaaatccaagtttcgtgtggtgacccaaagtcatcaccatgctcaagatgctcgtagtcagcatcttcatcattttcatgctcttgcaagaggtcaatggcttgatcgtaagtgatacgtttgaatggctctgcaatgtagcgtttcaagagttctgtatcacgttccaaggtttccaaggcttgaggcgcgcggtcaagaacaccttgtagaagagctttcacataagcttcttgcaagtcaagcgactcatcatgtgtcaagtatgagtactcagcatccatcatccagaactcagtcaagtgacggcgtgtttttgatttttcagcacggaaaactggaccaaagtcaaagacacgaccaagagccatagcccctgcttctaggtaaagctgacctgattggctcaagtaggctggcgttccgaagtagtcagtttcaaagagttctgtagaatcttctgccgcatttcctgaaagaattgggctgtcaaacttcataaaaccgttcttgtcaaagaactcataagttgcatagataatagcgttacggatttgcaacacagctacttgcttacgagagcgtagccacaagtgacggttatccatcaaaaagtctgttccgtgttcttttggtgtgattgggtagtcttgagattcaccgatcacttcgatgtctgtgatgtccaactcatagccaaatttagaacgttcgtcctctttgacaatacctgtcacataaacagacgtttcttggctcaagcgtttgataacatcaaacttctcaagtcccacttcttcaccaaatttttcgacaaagtttggtttaaaagccacaccttgaaagaaggctgttccatcacgcaattgtaagaaagcgatttttccttttcctgatttgttggcaacccaagcgccaatcgtcacttcctgaccaacatagtcttttacgtcaataatcgttacacgttttgtcattatttttccttttcttttttattctttatggcaaaccacctctatattgttcccatccaggtcaatcataaaagcagcatagtaaatcggatgctcacttcgataaccaggagccccattgtctcgcccacctgcctctaagccagcctcataacaagcctgaacttcttccttattttctgctaaaaaagcaaaatgaacaggatcttgtgttccctgagtcagccaaaaatcaccaccaggatgagggctgttcggggatagaaaactaattagagaactagtcttaaaagccaatttatagtccaaaggagcgagaaaactcctataaaatccttatgaaatttgtaaatcctttaccttaatctcaaaatgatcaatcattctcactacccataaatgctttcaagcgttcgactgcttctttaagcgtgtctaggtctgtcgcatagctgaggcggacattttctggtgctccaaatccagctcctgttaccaaggccacttcggcttcttctaagataacagttgtaaagtctgtcacatccgtgtagcctttcatctccatggcctttttgacatttgggaagagatagaaggccccttgcggtttgaccacttcaaatcctggtacctctgcaaggaggggatagatggtattaagacgttcctcaaaggcctgacgcatgctttctacagtatcttgctcacctgatagagcctcaactgctgcatattgggctactgctgacggattcgaagttgtttgacctgcaatcttggacatggcagcgataatgtctgcttctccaacggcataaccaatccgccaaccagtcatggcataagttttagacacaccattgatgaccactgtttgcttgcgaatcgcttccgataggctagaaatcggtgtgaactcatgaccattataaaccaagcggccatagatatcgtctgctaggatgagaatatcattttctacagcccagtttccaattgccaagagttcctcacgggtgtaaatcatacctgtgggattagatggcgaattcagcaccaaaaccttggtcttgtcagtgcgagctgcttctaactgctctacggtcaccttaaagtgattgtcttccttagcagaaacaaagacgggaacgccttctgccatcttgacctgatctccatagctaacccagtatggggttgggatgatgacttcatcacctggattgaccacagccataaagaaggtatagagagaatatttggctcccgcagcgactgtcacttgatttgacgctacagaatagccgtaaaagcgctcaaagtagctattgaccgccgccttaagctctggcagacctgaggttactgtataaaaagaagcacgcccatctcgaatcgatgcaatggcggcatcttggatatttttgggagtagtgaaatctggctcacccaaggttagagacaaaatatctctaccctcagccttcagtgctttggcacgggctccagcagccaaagtcacactttcttccatttctaaaacacggttggatagtttcataggccctccttgttgaccaatgctcctgtttcaaaatctactagataaaaatcagatcctgacttaacttcccagattggcttatcttgataacggccaaaggttatcttgtcaatctcgccagctcccttttccttagaaaccgtttctgctttttcttgtgaaacaccctgatttagctgataaacgtaaatcttatggtcatctttaccaatcaggacagcaagcgcttcttgctgtttgttacgaccaagaacgctgtaataagattccaagccattgtataaatcaacctgatcagcctgctctaatcctgcatactgctgagctaatttttctccttcacttttagctgtttgatagggtttcatgctaagagaaaccatatacagaaaggaaccactgataaccacaaacaaaatcgtcatccctagaccatactgccacagtagattattttttgctttgttttgtctttttttcactcgtctattttaccatctattaagctttattacaagtgaatataagaatactcttcgaaaatctcttcaaaccacgtcagctttatctgcaacctcaaagctgtgctttgagcaaccaattctatttctcccttcaaacaaaaccgattttgaaagtgaaacagttcttactttttcagtcacaaatgattagagtttccgaaattttacaattttcaaataaactctgagcaaatttcttgcaagttcttttgttttgttgtaatatattttataacaacgagagagttctcgaaattttaagaaaaaggagacacatcatgtctaaaaaagtattatttatcgtcggatcactacgtcaaggttctttcaaccaccaaatggcgctcgaagctgagaaagcacttgctggtaaagcggaagttagctaccttgattattcagcccttcctctcttcagccaagatttggaagttccaacacatccagctgtagctgctgctcgtgaagcagttctcgttgcggatgctatctggattttctctccagtctacaacttctctatccctggtacagtgaaaaacttgcttgactggctatctcgtgcccttgacttgtctgatacacgtggcgtttctgcccttcaagacaagtttgtcacagtatcatctgtagccaatgcagggcacgatcaacttttcgctatctacaaagacctcttgccatttatccgtacacaaggcgttggtgatttcactgctgcacgtgttaatgactctgcctgggcagacggaaaattggttcttgaagaaacagtcctaaactcacttgaaaaacaagctcaagacttggtcgaagctatcaagtaactaacactcaataaaaatcaaaaagcaaactaggaagctagccgcaagctactcaaagcactgctttgaggttgtagatagaactgacgaagtcagtaacatatatacggtaaggcgacactgacgtggcttgaagagattttcaaagagtataacataataaaagcgaacaagactacttttctgacactcagaagactagcttgttcgcttttttctcatttataaactaaaatagctgatgatacatattgccaaatacaaaatatctgatttctatacttcctttacaaaaaccaatccctgtggttgtgacaaatcttctcggtaaacaaatccagcaaagttcaagcgacgtgcttcccccacagtttgtacttgattttctattaaagctgttagaaaggccccgcgcgctttcttggagatagttgagtgaatcttcagctgaccgcctctatcctccatgaatttgaaggtcaccatctttgctctgatttccttagaaaatacagtctcaaactctgatgacaagagagagaaaatcacttcttccttcttcagagtttcatcataggctgccttccaatggctcttcaaagtcttaccagcgacttttaatttcatcaaaaaatccaaacggtgaggagccatgggtgacaagactggaacaacaccgtacaaagccgaggtaatgaaaacatgattttcaagataatcttgttccgcctcggtcagcttatctctcttaatgttgcggtacataagcccatcaaaaagtttcaaggctggatagtgttgagcagtttgccttttcaaagcttggatattttgaaattcttccgccgctttctcagctgataccttgtagaaactctccaattgactggcagaatagagagccaaggcatcaagcacggcctgactttctggttttaaaggaattgcctcgatacttgggaagtctgtgttcatttcttttgctgttgggattaaaattttcatattgatagtgtagcatattttttagccacaaccaagaaattcatttgaaaaacctcggtttgaccgaggtttttctatttatttgggccatcctaaccagacagccacgagaacaagggctgtgccagctaaacttgttaagatagataagaatttatcttttttctccttgaactgagaaaaacctatcttcaaagcgagcagtccgagtagcattgaagcaaccatcaaataaaaacccatttctttgtcctccattaggcttaatttaccttattataacatatactttctgaaaaaaacctatttttaccgtagcttaaaggtcttgagataattgtcttttcctacttgaccttcgaaggttttaccattttcaaggtaaggaaggtcatcggatactgaagccttgaccttgtatatcttgccatcaactttaaagaagtagacagtgtctcccttgataacagctgatttgaggtctgctactactccattgatgctttctgtcgttgcattgtcaatttcaaggtcgtttttattggcatacttgctgagcatctcttccactgtagtagcaacgataacattttggtactcgactgcgtctaccagggcgtactctttgaccaagccagcattgtccttcaagcccatgatgtagagaggcttgtcattgaggttgatgaggattgggaaggttgctttgtaggatttctcctgaacagcaccttctgctgattcacgggctgattcttctgtcgcagaagccaagctatacttagtgatttctcctgttcgcatattttcaaggatgaaaccaagattactctcatccgcattagccgacgtcacacctgtgtagagatagatgtcattaccgatagacaagtaattatagccattggtagtctgggtcacgtttttcttggaaatcatggcattcaagaaaccgtccttgtacttgccgttgtagttgatttgctcaatggtttcctctgctggatagatcctgtccacccattctggaacatctgataagctgtattccttggtttctccatttgtagcatccaagataatgactgaagcaggacgaggaacagcaagtccaaattgcttttggtaaaccgttgctacatagaaaggattgccctcatcgtccacctcaaaagatggagttttaaagattttggtcgggtacttcaagcgcaggtgacgtttgacatcacggttaaaatactccgagtctgaatacttgattggtgtcttcaagtccaccaaatccgcatttccagttaccatgtccaccttaatatactcaccgattcccttggcttgattgttaaaccatttgatagggtctgcatattctagtggtgtgacccgataaggtttcccatcaattgtcaattgggtataggtatctgccgctacgtattgcgacaccttatcggttagggaacccaagtagcggtctccaattttttcagcagtacttctatctaggataggaaccttactggtgtcactcttaggaaattcagtaaagtctttttccgtaaccgtgactacattggcataatttttagcctgaaacatgctggaagttaccaaggaaaccaaagctgccaagagaagaattcctccaatcgaagctaacagaattttccctaaccgattgattttgaaaccctcaagatttaaggcagcttccgccttaccgtggcgcacatgaaccgttttgacaaggtttatccccttgccaaagccaaataatattgccacaactaacaaatgcccacagaggaagaagagaaattcccagctggtcaggttaaggggcggtaaaaagatataccaggtcgttgcgataaaaataagttcaaagactattcgtttcatttgctttcctcctaaatgattcgtccttccaagtgatccagctcatgctggcaaatctgagctgggaagcctgtcaaggtaatggtctgttcctgccacttgctgtcacgataggcaagccttatggtttcataacgcttagttgatctcacacctaccaaggacaaacagccttcttctgcctcataggatccttcaaaggacagaagcactgggttaaacatgaccacaggaaccaagccaagattaaagataatcacgcgcttctgcaccccaatcatattggcagctagaccaacacaggtatcacgatttgctaagagtgtatcctgcaaatctctggcaagataaaggtcctcctgacttgccggctgagacacttgagataaaaataagatatccttcacaattttcttttccacttcctcacactcctcttgctttttactatattatagcaattatagcacaaaagccgataactgcaaaccctttccctcaactgtagcaaaaagccatccgaagatgacttttttgctatttaatttctgtataagttacttccaagccacgcttaacagctggacgattggcaattttttctgcccattttactagattttgataacttgaggcatccaagaattttgcagaaccttggtaaagatttccttgaactaactgtccataccaagaccagatagcaatatctgcaatcgtatagtcattgcctgcaatataaggtttctgagccaattccttatccaataaatccaactggcgtttcacttccatcgtaaaacggttaataggatattccaatttttcaggagcataattgaagaaatgtccaaatcccccacctagaaaaggtgctgcacctgcttgccagaatagccaattcaaaacttctaccttttccacaggattacttggtaaaaaggctccaaatttctcagcaaggtaaagaagaatatgagcagactcaaagactcttacgttttcagtacctgactggtccaataaggctggaatcttggaatttggattgagcttcacaaagtctgatccgaattgatccccatccatgatagcaatcttatacaagtcgtaagccgcttccttaaaaccagcttctagtaattcttccaataagatagtaaccttcacaccatttggtgttcccagtgaataaagctgaaaagcttgttctccttttggcaagttttgttcgaaacgggcacctgctgttggtctgtttagccccgtaaaagctccttgattactagcttcatcctgccatacggtcggtaattgatatgctgacatccgaaacctcccttaaatcgcattcttgtcaaaaccgagtttgcgttgaataaacttaacgatttcgacgatgataatcattgagaagcttccagccataacaattccccattgtgacaagtctagtttggttacgtggaagattccttcaagcggttctacaacgattgttgccatgagaaggataaaggataccaagatggaccagttaaaggtcttagacttgaatgggccaactgtcaagatggattggtagacagacttgacattgtaggcatggaagagctgaatcaaaccaagggttgcaaaggccatcgttagggcatctgcatgaatagcatgattgtcacccacatgaactgggtaagcaatcgcaaggccataaacactcataacaagagctgcttggagtacaccttgataaatgatagaactcaaaacaccacctgagaagaagcttgccttgcgtccacgtggtttatgattcatgacaccaggttccgcaggttcaacaccaagagcgatagctgggaaggtatccgttaccaagttgatccacaaaagatgaaccggctgtaagacatcccaaccaaacaaggttgataggaagatggttaatacttcagcagtattagcagaaagtaggtactgaatagtcttttgaatgtttgagaagaccttacgtccttcttccactgcgacgataatagtcgcaaagttatcatctgcaagaatcatatcagaagcccccttagaaacctctgtaccagtgattcccataccgataccgatatcggctgttttcagagctggcgcgtcattgacaccgtcacctgtcatggcaacgactttaccttgtttttgccaagccttgacgatacgaaccttgtgttctggagacacacgggcataaacagagtattgaccaacgactttttcaaattcttcatctgacagttcattgagttcagcaccagttaaaacgtgaccttctgtatcgtttgcgtcaatgattcccaaacgtttggcaatggcttccgctgtgtcttggtggtcacctgtaatcataattggacggattcccgcttccttagccacacgaacagcctcagcggcttcaggacgttcagggtcaatcatcccaatcaaaccagtaaaaattaaatcattttcaagctcttcagaagtgagattttctggaatactatcgataatcttataagcacctgcaaggacacgcaaggcttgatgagccatttcagaattgtttgtacgaatgagatttgtaaccttctcatcaatcggagcaatatccccagccttatcacgaagaagacaacgttttaagagttggtctggcgcacccttgactgctacaaggaaacgaccatctggcaatgggtgaactgttgacatgagcttacggtcagagtcaaatggcaattcagctacacgaggatatttctctaagaaacctttgacatcatagcccttgtccaaggcatattggataaaggctgtttcggttgggtcaccaatcaagttaccttccacatcgattttcgtatcattggccaagacaactgaacgaagtagtggcatttcaagacctagttcaatatcatcagctgagtcatgtagaaccgcatcgtagaagactttttcgactgtcatcttgttcatagtcagcgtaccagtcttatcagaagcgatgatttcagttgaaccaagtgtttcaactgctggcaacttacgaacgatggaatgtcgtttggccaaaacttgagtaccaagagaaagaacgatggtaacgatagcaggaagtccttctggaatggctgcaacggcaagggcaacagaagtcaacaactcaccaagtggatttttcccttgaatgaagacacccactacaaaagtaacaagggcaatgaccaagatagcataggtcaagaccttagaaaggttgttcaaattttgtttgagtggtgtatcagtctcatccgcatcttgaagcataccagcaatatgaccaacttcagtgtacatacctgtattgacaacaacacccatcccacgaccataggttacgtttgagttttggaaggccatgttgacacggtcaccaataccagcatctgtcgcaagctcgactgacaagtctttttcgactggtacagattcacctgtcaaggctgcttcttcaattttaagagagttggcttctatcaaacgtaggtccgctggtaccacgtcacctgcttcaagggcaacgatatcgcctggtaccaattctttagagtcaatctctgccatgtgtccatcacgaagaacgcgggcaactggactagacatggatttgagggcttcaatagcttcttcagcttttccttcttggtaaacaccaaaggcagcgttgatgataaccacagctaggatgataatggcatctgcgatatcttccccaccagaagtcacgactgacaagattgctgccgcaactaggatgataatcatcaaatccttaaattgctcgatgaatttgaccaagattgatcgtttctcgccttcttcgagttcattgtgcccaaattcggcaaggcgcttttccgcctcacttgatgacaaaccttgctcggtcgcatccacagcctgcaagacctcttcagggctctgagtataaaacgcttggcgtttttgttcttttgacatgtgtctcctccttgacattgtgtgcaaaacagactctctttctgtcatagcttttcacgacaaacaaaaagaaacctgttaatcataacaagtctcgctgtttaagatagggccggaaagcatacttttcagcataaaattcggaatgacgacactatcacaggtttctgccagctactcccttgagtagtaccattataccaaattttggggagttttcaaagagtaaaaactgccttatttgaatttttccttgaaaaccagtataatggtagaatgctatgtgactagaaaggaagttgaatgaagcaatctatctcaaatctcaagttagctgagcgtggagccattatcagtatttcgacctatttgatcttgtctgcagccaaattagcagctggtcatctccttcattcatccagtttggtggccgatggttttaataacgtatcggacatcattggaaatgtggccctcttaatcgggattcggatggcgcgccagcctgcagaccgtgaccaccgttttggtcattggaagattgaagatttggcaagcttgatcacttctatcatcatgttctatgtcggtttcgatgttctaagagataccattcaaaagattctcagtcgggaagaaacggtcattgatcctcttggtgcaactctaggaatcatttctgcagcgattatgtttgtggtctatctctacaatactcgcctcagtaagaaatccaactccaatgcgctgaaggcagctgctaaggacaatctttctgacgctgttacctcacttggaaccgccattgccatcctagctagtagtttcaattatccgattgtggataaactggttgctatcatcatcactttctttatcttgaagactgcctatgatatcttcatcgagtcttcctttagtctttcagatggctttgacgaccgcctgctcgaggactaccaaaaggctatcatggaaattcccaaaatcagcaaggtcaaatcgcaaagaggtcgcacctacggtagcaacatctacctggatattacactagagatgaatcctgacttgtctgtttttgaaagccatgaaatcgcggatcaggtcgagtctatgctggaggagcgttttggcgtctttgataccgatgtccatatcgaaccagcacctatccctgaggatgaaattttagacaatgtctataaaaaattgcttatgcgtgaacaattgattgaccaaggaaaccaactagaagaactcttgactgatgattttgtctatattcgccaagatggagagcagatggataaagaggcttataagaccaaaaaagagttaaattctgctatcaaggacattcaaattacttccatcagtcaaaaaaccaaactcatctgctatgagttagatggtatcatccataccagtatctggcgtcgccacgaaacctggcaaaatatctttcatcaagaaaccaaaaaagaatagagaaatcctttcatgagacgggatttttctattcttttatactcaataaaaatcaaagtgcaaattaggaagccggtcacaggctgtacttgagtcggcaatgtgaagccgacatagtttgcactttgattttcgaatagtcttaactatcaaattcactgagatactcatagcgttcgtatttttcaaggagtgcttcatttttctcatccaattctttttggagagtagccagcttaccaaagtcagagccgttagcctgcatttcctcttcaatagcagcgatacgtttttccaaggtttcaatatcaccttcaatacttgcccactcctgcttttcttggtaggtcatgcgtttcttgtcttctcgaaccttgaccactttttccttttcggccttttgcacttgattggccatatctgtttcaaaagctttttcatcaagatagtcggtgtaatgaccaaagaaaggacgaatcttgccatcctcaaaagcgagaatcttggtcgctaccttatccaagaaatagcggtcgtgactgactgttaaaacgggacctgcaaaaccttgcaagaaattctctaagactgtcaaagttgcaatatctaggtcattggttggctcgtctaaaagaagaacatttggtttttccaaaagcagtttgaggagataaagacgttttttctcaccccctgacaatttctcaatcaaagtcccatgcgtcgaacgtgggaagaggaattgctccagcaactcagcgatggaagtcgtagaaccaccactggtcttgacctcctctgccacttcctgcaggtaattgatcacacgcttgctttcatccaaaccctcaatttgttgagagaaataggcgatgcgaacagtttccccaatcacaacttgtcctgctgtcggctcaagacttcctgcaatcaggttaagtagggttgattttccaacaccattgtccccaacaattccaatacggtctttagcctgaactaagagattaaaattttgcaaaatgggcttattttcataggcaaaggaaacatcctgaaactcgatgactttcttcccaatccgactggtttcaaagttcatagtcaagtctgtctcagcactactgcctgaaacttcctttttcagatcatggaaacgattgatacgagcttgttgcttggtcgcacgcgcctgcggttgtctgcgcatccaggccaattcttgtttgtagagttgttcttttttgtgaagaagagccgcgtcgcgctcatcctgttccgcctttaggcgaacatagtcctggtaatttccctggtactcggtcaagcctgcacgatccaactcgaaaatccgtgttgacaaagcgtctaagaaataacgatcgtgagtgataaaaaggacggtcttcttagaatttttcaaaaagagggtcagccactcaataatcgcaatatccagatggttggtcggctcatccaaaagcaagaggtcgtggttgccaagtaagacttgtgccaactgtacccgtcttctcagaccacctgacaattccccaacaggagtagataagtcttgaatgcccaatttgctaagaacggtcttgacctgactttcgatttcccaagcttggagagagtccatctctgccatgacacgttccaaacgcgcctgcttgtcctcactatagtcgagcataatcaattcatactcacgaatgagctggatttccttgagttcactagatagaaccgtatccaaaactgtctttctatcatcaaaatcaggatcctgagtcaagtaaccaatctggtaatcatttttagctgaaaaaggactgacatccccatcaaatccagaaacaccagaaaggacgtccaaaagggtggtcttgccagtcccattgacaccgattaaaccaattctgtctaagtcatggataataaaggaaatatccctaaaaacggtcttgtcaccaacggatttacttagtttttcaacgataaaatcactcattttttctccctcaggtaagcatggatggcttcacgattattctccaattctccatcgacaatggcaaactcaatctctgttaaaatctctcccaagtctgggcctggctgatagccatattccttgatcaaaataccgccattaatctgaatctctttcttgtcatggatagtcaagctttggtatttttctgtgatggcttgtgggttgacttcttttccttgagcttgacgaagattttcagcctgtaaaagcaaatctatgtcaaagcgataacaatctcgcttgctcaattctccattttcacgcagagccaaaataatcagcaaatcctgaacttgcttggcaaactggcgtgaggtcttccaagatttcaaaaatgactgcgcattttcaatctccaaagcccatagtaaagccgcccaggcttgttcagaggattcaaaagtaaaatcagtctccaaatcaaacagtctgttgagcttgtcctggctagatgccatatcagggagatagtcataagcttgactctcaatcatggaagccaagccccttctccaaaatggagccagcaagagtttatcaaactcgacgaaggtacgctctacagaaattttctccaaaagcggcgtcaaggtcttcatagctttaaatgtttctggctcaagtgcaaaaccaagactagcctgaaaacggaaaccacgcataatccgtaaagcatcttcgttgaaacgctcactagccactccaactgctcgcaagacttgcttttccaaatcttctaaaccatggaacaagtcaacgatttctcctgtctcatccaaggcaaaggcgttgactgtgaaatcacggcgtttgaggtcttcttctagcgatcgtacaaaggaaaccgcactgggtctgcgatagtccacatagacatcctctgtccgaaaggttgttacctcatactcctcatccccatctaagaccaagacggttccatgctcgattccgatatcggctgttcgcggaaaaatctgcttggtctcttctggataagaagacgtcgcaatatccacatcgtggatagggctatggagaagggcatctcgaacagagcccccaacaaaataagcctcaaagcctgcttctttaattttttctaatactggtaaagccttctgaaattcagaaggcatttgcgttaatctcataataagtgttctaatccatagacaagctcatgacgcttgacaacttctttaattcccaaattgactcctgtcatgaaggagatgcgatcataggagtcatgacggagggtcaacccttctccctgattgccaaagatgacttcctgatgagctaccaagcctggcaaacgaactgagtggatgcgcataccatcaaagtcagcaccacgagcaccagcaatcagctcttcctcatctgctgcaccttgctgaattgactctcgaacctctgccatcaactcagctgttttaatggctgttccactcggagcatcctttttcttgtcatgatggagctcaataatctccacatttgggaaatatttggcagcctgcgtcgcaaattgcatgagtaagacagcacccaaggcaaagttaggggcaatcaggccacccaagtcttgggcacgagaaaattcttttagctctgcaatttcttcactcgtgaaaccagtcgttccaactactggagcaaagccattttcaagagcaaaacgtgtattttcgtaggcaacagctggagtagtaaaatctacccagacatccgcttcaaaaccagctaaatcagccttatccttgaaaacaggaataccctgccattctgactcagactcaaaaggatccaaaactgccaccaagtccaagtctggatcagtcaataccatctgacaagcagcctggcccatctttcccttaaaaccggcaataattactcgaatactcatctctactcctgtctaagatacaaagtccgtaagaacacaaagtgaaaataggaattccaatcaagaagtgtctacttcttggaagaactatctttttcacacagggttccaggcgtgttcaattatcaagatacaaaggaccttagctgcctctgaaaaatagggaatggcactgactttccacgaaaggcaagacaggcatcttttttcaagaggcaggtagtccgtgttcaatttctaagatacaaggcatcttaactagcctagaagcgccaactaaatcactggaatataacccagagcaatacttcctgctcctaggtgcgttccaatgacactaccaaatgtagcaagtgaaacatccgaacccaagccaaaatcaagcaagtgctgacgcaattcttcagccttttcaggagcattcccatgaatgacaatgacccggtattgacctgaagccgttgtttccttgataatttcaattaagcgcttggtggccttcttttcagtacgaactttttcgtaaacttcaatcacaccttgatcgttaaaataaaggattggcttaatgctaagcaaattgcccaaaatggcagccccatttgaaaggcgtccaccttttaccaaatgatccaagtcatctaccatgataaaggctgacgtacggctgatttgaatggctagcttatcctgaatgctggcaaaatcatcgccctgatcacgccaattaaagacgctttcaaccatgatgcctaggggagcacttgtaatcaaagtgtctgggaaagcaatggttaagccctcatagtcatcgaccatatactggatattttggtaaaaacctgaaattccagaagataggaaaagccccaaggcatgtgtatagccttgttctttgagcgaagttaagatctcatctaacttggcaatacttggttgactggtcttaggcaattcagaagcctgagccattttttggtaaaattcctcagcagacagattgatgccttcgacatattcctcaccatcaatattgacaggaatatccaagacaaacaagtcttctctttgcaagatctctgcactgagataagcagaggaatctgtgaaaacagctaatttcatattagaactccaaattaattcctggtaagtctaatgcaatttcagtcacttcgtaagtcaaacgattgagcatgttcaaacatggacgagccaaggtttccacctcttcttggttcaattcacttggttcattgacaatacggccatcgatatggtttacttgtgagattgttccactaatgacaaacttatcaaatacaatcataaagctcaagatgacaatcaaggaagtcacttgattttcttggtcatgttggagcaattggaaattcacatccaccttggtttcaggagctccattttcattttcccattcaaaattacgcgcatcaaaatgatactgactaacaaattcttgttcacgtttaagattcatgtctttctccatcggctacaatattataagctattgtaccataattttttattttcatctagttttctaggatttagtcaatcccaatttcagcacgaactacatctgtgatggtatcaacatagtagtttacttcttctgttgtaggcgcttctgccataacacgcaagaggggttctgttccacttggacgaacaaggatacggccgttccccgccatttcttcttccatcttctcgatgatggccttgatagctggcacttccatggccttttccttcatgacgttttccactcggatattaactaatttttgtggataaatcgttacttctgccgccaactctgataagctcttaccagtttccttcatgattttagtcaattgaactgctgataattgaccatcacctgtggtattgtaatccatcaagataacgtgaccagactgttcaccaccaaggttgtagcctgattttctcatttcttcaacaacgtagcggtcaccaactgcagtaactgccttgttaataccttcgcgattcaaggccttgtggaaaccaaggttagacataacagttgtcacaattgtattttgagccaattgtcctttttcagaaaggtattttccgatgatgtacataatcttgtcaccatcaacgatgtcaccattctcatcaacagcaatcaagcggtcactgtctccatcaaaggccaaaccaatagctgacccactttctttgaccacttcttgaagggcttctggatgtgttgaaccaacattaaggttgatgttaagaccgtctggtgtttccccgataaccgtcaattgggcaccaaggtctgcaaagatttgacgggcactggtagaagctgctccattagctgtatccaaggcaaccttcattccatcaagaggagttccagttgaaacaaggtatccttcatacttacgcaagccttctggataatctaccaaaattcctaagccttctgcacttggacgaggaagagtgtcttcctcagcatctagcaaggcttcaatttctgcttctttttcatcatctagtttgaagccatcaccgccaaagaacttgattccgttatcaagggctgggttgtggctagcagaaatcatgacaccggcacttgctccttcagtttcaaccaagtaagctactgctggtgttgcaaggacaccaagtttgtatacgtgaatccctactgaaaggagacctgccaccaaggccgattccaacatttcccctgaaatacgtgtgtcacgtcctacaaagactttcggcgcttccgtttcatgttgactaagaacatagcctccaaaacgtcctagtttaaaggctaattctggtgttagttctaggttagcttctccacggactccatcagtcccaaaatatttacccattgttataaaatccttttctatttttaattcgtttttgaactagttgctttcgttgacgaagatgtctccgatgaactgcttgtacttgaatttgatgtgcttgaacttggtgctactggttttgtagtcaccttcattattgtatcaaacggagtgataactgccggtaagacaacaccattgcggtcgattgcctgcaaaggtactgaaccactgtaattacctgttatacgttcgctagttggcaaaacagcgataatcttatcaattctatccaatgtctcttggtcactcgtaatagacacttctttatctgacaccatgacattttcaatttgtacccgactatcaatttgactagggtcaatctctggtacaatctttaccttatccttctgagccttcttaccaatcttgactgtaattttttgcggagtcgccacagcggtcagcccattgggtaaatcttcaatgctcaaaggaacttcaatcgttccaacaccggcatctgttaggtcagcagtaaccttgaatttacgtgtactttcttgcatttcactagctagcgataggcgatttgcaccagtcaagaccactgatacttctgaagcaaaaccgctaataaaatacttatcactattatagcgtatgtcaatagggacatttgttactgtattagtataggtttccgtttttacctgcctagcactggtactgttttgaaaattcgtcgccgtagcatagacaaataagacacaagcaaaaaagagtgaggatatgatatataaactattttttttcatgtttccatcctcctagcaatcgttctttaaaactaagacccacttcctcttttggaagtaagatttcacgtaattctgtttcaaattcatcaagtgttaggttgtgcttaaaccttccattataggttatcgaaattcctcccgtttcctctgatacgacaaaagtcaaggcatctgagacttctgataaaccgatagccgcccggtgtctggtcccaaattccttggaaatccctgtgttttttgtcaagggcagataggcagacgtcacagcgatacgttcttctttgataatcaccgcaccatcatgtaggggagtgttgggaataaaaatgttaatgagaagttctgcagaaatcttagcatccaagggaattcctgtcgaaatatactcctgcaaggtacgtacacgctgaatagcaaccaaggccccgattttacgaggactcatgtattcaacagacttaacaaaggcacgaatcatctgttcctcagcactaataggggcattggaaaagaaatctgtcgctcttcccaaacgttccaaaccagtccgaatctctggagagaagataacaaccgccgcaataaccccataagtaataatttgattgattaaccaagaaatcgtagtcaaaccaatcatatttgcaaggatttgagctaaaataaacaccaaaactccacgtaccaaaatcataatcttggttcctgcaatagcttttgtaaaatggtataaaatataagcaacaatcaaaatatcaatcagattgatagctatcgtccatggacttgcaaacaaactggtccaatattgcagattggataattgttgaaaattcatccctgatatcctccctatcaaaacactttcgtcctattataccattttctggcatttttttccctatcctagtccattttacattgaacaaaaatatgataaaataaactgactaaaaaaaacaaaggagaaactatgtctcaactctatgatattaccattgtgggtggtggtcctgtcgggctttttgcagccttttatgcccacctacgccaagccaaggttcaaatcatcgactctcttccccagctaggtggacaacctgctattctctaccctgaaaaggaaatcctagacgtaccaggcttcccaaacctgactggagaagagttgactaaccgcttgattgaacagctaaatggatttgatacccctattcatctcaatgaaacggttcttgagattgacaaacaagaagaatttgccatcacaacttctaaaggaagtcacctgactaaaacagttatcatcgctatgggtggcggtgccttcaaaccacgtccgctggaacttgaaggggttgagggctatgaaaatatccactaccacgtttctaacattcagcaatacgctggtaagaaagtgacgattcttggtgggggagactcggctgtggattgggctttggcttttgaaaaaatcgcaccaactacccttgttcaccgcagagataatttccgtgccttggaacacagtgttcaagccttgcaagaatcatctgtaaccatcaagacaccattcgcccctagccaactccttggaaatggaaaaacacttgataaacttgaaatcacaaaagtcaaatctgatgaaactgaaaccattgacctagaccacctctttgtcaactatggtttcaaatcttctgtcggtaaccttaaaaactgggggctcgacctcaaccgtcacaagattatcgtcaacagcaaacaggaatccagccaagcaggtatctatgctatcggtgactgctgctactatgacggaaaaattgatctgattgcgacaggcctcggagaagctccaactgctgtcaacaacgctatcaactacattgaccctgaacaaaaagtacaaccaaaacactctactagtttataaaaaagaaccacgagtcacataggattcgtggttttataattcatccgctatcttattgatttttctgagtctgtgattgacaccacttttggtcagaggggtgctgagactatctgctaactgctggatagagtagtctgggtgctgaatcctcagttgcgccacttcctgcaaatctactggcaaattttctaagcccatgatatctttgattttactgatattgttaatggtcttcatgctggcagaaactgtccgagcgatattagctgtctcggcattattagcccgattgaggtcgttacgggtttctcgcaaaatcttaacccgctcaaaatcatcacgtgcctgcatggctcctattactatcaagaagtccataatgtcttctgctcgctggagataggtcacagcccccttcttgcgctcaagcaccttggcatccagtaaaaactgttggagaagggaggcaattccttgcgcgtggtccagataaacagaactgatttccaactggtacttgcctgactcagggtcacgaatgctcccatttgccaagaaagcgccacagagataggcacgacctgcttcctcatccgataaaatcgcctcatcaatacctgtttccaggccaaagaaagagtctgccaagtgcaaatcacttaacaaatcctgcaccttttcatctgtaaaaacggtatagacgcgattcttgcgaagattgctccgttggtggtgacgaatttcagatttgatttcatagagatggagaaaggactcatagaggtgacgggccagtttggcattttctgtcacaactgacaaagtcaagcccgaagtcgagagaccgatgctaccagacattttgataatggcagataattcatgccagctcagatggtgttggcccaggatttcttcttttactgctactgtgaaactcattttttcacctgtataatgcgcatcaactcgtccacaatcaaatctccatcgtggaaggcaccgccattttccagacgaaggaagttagatgaaatcacgcgcgaaacttgcttacaaagacctacaaaatcgtgttccacttgcactaagtattcatcaaaacggttggaattcatgtattcctgaggcactttttcaatattcaccaagacagtgtcgataaaagggcgaccaaggtgacgatgcaagacttccacgtggtcgctatctgtaaagtgttccgtctccccacgttgggtcatgatattgcagacataggcaatttctgccttggtttccaaaagagcccgcccaatttccttaatcacgatattgggcaaaatagaggtaaagagggaacctggccctaggacaatcatgtcactttcaaggatggtctgcactactcgacggctggccagaggcgtatcatcgtttagggcattggtcacatagacattgtcaattatgcctcgatggtctacaatatgactctctccagccacttctgtcccatcctgaaagactgcatgaagggtcaaaggatggtcactggaaggataaattttccctgttgtatggaaaaatttgctcaataactgcatggcattataggttgaaccctgcatttctgacaagccagcaatgatgagatttcccaatggatggccagcaaaggctccggcatcctcagagaaccgatactgaaagaccttctcataaaacttaggcatatccgacatggccacaaggacattacgaagatcacctggcggtgtcaactgttgcatattttttcggagttcacctgaagaaccaccatcatctgccaccgtcacgatagctgcgatttccacatctttttcccgcagactttttagaatgacgggacttccagtccctccaccaatcaccgttatctttggttttctcatgaacggtttaccgtttcctttctgcggtctttgtcgcgatgcccttcattaacagaccaattcttggataagtcctgcgccaagcgtttagcaaatgccacactacggtgttgtccacccgtacatcccatggcaatggtcaaaacggacttaccttccttttggtaacttggcagaatcggctcaatcaaggccaataaatgttgataaaagtcttctgactcaggatggttcatgacataatcataaacaggttcatccacacccgtttggtttctcagttctggtaaataatagggatttggcaagaaacggacatcaaagaccaagtccgcatcaatcgggattccatacttaaatccgaaagacatgacttcgatacggaaagactgggcttgttcttggtctgaaaactgctctgcaagggttttgcgcagctcacgtggagtgagttcagtcgtatccaccacattttggctcatatttttcaaaggtgccaagagttcacgttccaacttgattccatctaaaatacgaccgtctgctgctagtgggtgactccgtctggtttccttgtaacgagcgaccaattccttatcagccgcatccaaaaagaggattttgaaatccaaaccatcttgattttccaactcatccaaaacagcttgaatctctgaaaagaaagaacggctacgcatatccactaccaaggccaacttaggattgtcttccttaatttcaaccagctgcaaaaacttaggcaagagagctggcggcatattatcaatggtgaaataacctagatcctcgaaggactgaatggctacagttttccctgcgccactcatccctgtcacaatcaccaagtgaagttgtttctttgtcatctttttctccttatatcaaaagaagtttggcaacaccaaacttcaactagcttatccaatctctgcgatgacttcaatttcgacttttacatcacgaggaagacgagctacctccacagctgaacgagctgggaattcctctttgaaggccgtttggtaaacctcattaaaaggaacaaagtcgttcatatcgctcaagaagcaagttgttttgacaacatggtcaaagtctgttcctgcttctgccaaaatagcaccgatgtttttcaagacttgctctgtctgttcttggatattctctcctacaatttccccagtttcaggggataggggaacttgaccgctagcaaacaaaaggttgccaacgatttttccttgaacatagggtccgatagcctttggggccttatctgtatgaattgtttttgccattttcttttcctcacaatttttctaagattgcatcccaagcctcatccatccctgccttactgacagatgaaaagaggatgaaatcgtcactcgggtcaaagtttaatttctttttgattgctgattcatgcttgttccatttaccacgaggaatcttgtccgccttggtcgccacaatgatgactggaatctcataatacttgagaaattcgtacatctgcacatcatctgctgacgggtcatgacgaaggtcaactagactgacaaccgcacggagattttcccgagtcgttaagtactcctcaatcatgcacccccacttttcacgttcctttttagaaacacgagcatagccataaccaggcacatccacaaagcgcatcttgtcatcaatgttaaaaaagttcaggagctgggttttaccaggttttcctgatgtacgggcgagattcttacggttcaacatagtgttgataaagctggatttaccaacatttgaacgccctgctagggcaatctctggcagttcatcctgcggatagtgggacttattagctgcactgagcaagatttcagcattgtgtgtattaagttccatagtcacctctaggctgtttctaggatcggtttatccgttccatctacagtttctttagtgatgcgaaccaatttcacattttcctgactcggcacctcaaacatgacatctagcatggtttcttcgatgatggagcgaagtccacgcgcccctgtcttccgttcgattgctttattagcaatctcttgaagggcttcgtcgtcaaattccaactcaacatcatcataagaaagcaaggtttggtattgtttcaccaaggcatttcttggctctttcaagatgcgaaccaagtcatcaacggtcaattgctcaagagccgcaaaaacaggcaagcgtccaatcaactcagggataataccaaatttttgaatgtcttcagcgatgatttcttgcatgtatgagctgttttcgtcaatcgccttattattttgaccaaatccgatgactttttcacccagacgttgtttgacaatttcttcaataccatcaaaagcaccacccacgatgaagaggatattttttgtatccacttgaatcatctcttgttgtggatgtttgcgtccaccttgaggcggtacgctagcaacagttccctcaataatcttgagaagggcttgttgcaccccttcaccagaaacatcacgtgtgatagacacattctcactcttcttggcaatcttgtcaatttcatccacatagataatgccacgctctgcacgttcgatgttaaagtcagcaacctgcaagagtttgaggaggatattttccacatcctcacccacataaccagcctccgtcagagctgtcgcatccgcaatagcaaaaggtacattcaagctcttagccaaggtctgggcaaggaaagttttccctgaaccagttgggccaatcatcaaaatgtttgacttctgcaaatccacatcttctgactcttcgcgtgtatcgtggaaattgatgcgtttgtagtggttataaaccgccactgccaaggcacgcttggcacgatcttgaccaattacatagtggttcaagatatggaggagttcaattggttttggcacctcagacaagtctgccaagacttcctcaaccaattcttctcgaatgatttcctgagctaactccacgcattcattacaaataaaagcattgttgccagcaattattttttgtacttcttcttggtttttgccacaaaatgagcaataaaccatcatatcattttttctatttgtagacatgatttccttccattctatactgtcattctatctaaaataaggtcatgtaaaaagcatgaatactattgaccagattggtaaaggcatttaaccaaaggaggatagaaagcccgtaacgctttttacgaaaagcttgtgctcctgccagaaagcagatgaaacacagaaaagccgtgaatagaccaaataaactccgttccattagacttcctttctcttgcggtattggatggtaaaatcataaggattcttctcatctttggcgtaaaatttgcttgaaactgtctcaaaaagagacaagtcaagttcttcagggaaataggtatctccttccacccgagcatgaatgtgagtgacaatcacttcatcaaggtaaggttcaaaagcctgaaaaatttgcttcccaccgataatgtagagattcttttcttgagcctgataccagtcaagaacagactggacgtcctgaaaagtagcaaccccatctatcttttcttccggattacgcgtcaaaatcaaggtttcccgttttggaagcaagcgacgccccatcccatcaaaggtcacacgccccatcaagatagcatgattcagagttgtttctttaaagtgctgcaattctgctggcaaatgccaaggcagacgattttccttaccaatcacaccctcttcatcctgggcccaaatagctacgattttcttagtcatgcttccatccttttcactgatagtactattttatcaaaaaactcaaaaaaagactggtttggaatagcttacaaaatagaaaaaatctgtaagaaatttcctacagatttatctatgtttccttatttcttacaaaccaggtgcttgtccaagttcggctgcaagcatccaaattgttttatctgtttcagttttagcgcctgcaaagataccgtttgtcacatcgtcaccttcttcatcagtgacatccaaacctttttggaaaagttctgacaagtaacggtagataacaagaacacgttccaagctttcttcaacattacggtattcaccagcttcttcttcgatttcactattttgaaggaactctgtcaatgtagagaatgggcttccaccgagtgtaatcaagcgttcactgatttcatccaattgaccgtcaagagcttccatgtactcatccatttttggatgccatacaaggaaaccacgaccatgcatataccagtgcacttggtgcaaagcaacgtgagctacatacaaatcagcaacagcttggttcaagacttcctttgtttttgccaatgctactggcgctgcttttgtcaatgatgttacgtcttttactgcttcttttttcaattctaccattttctttacctcattcattattttttgtaaccacttcttaatgattactaccttagtatactactaaggaaaaccaatagcaagacaaagaacttatatgagaaaagttgcaatagactgataatttaagaattctttagaagacaaaaagagggttggatgcttatagtcaatggaaatccatcagcaaactaggaaactaaacccagcttgaccaaagcacaagttttgaggtcgcaggtagaactgaccaagctgatgtggtttgaagaaattccccaatactataatagattgaaataagatgaaaccaagtcgattaggaaaggtaaatgaatttctaaaatgttttaccaatcacaaggtatttgtctatattcaatctactatataagcttcatttccgagcaagaacttgaatttactcgaggatgaactatcataaaacaaagaaaaagagggtgctactatcacatccctctttcaaatcatcgcttaataccaaacgctgacatctacgcgcccttggattcctttcatgtattcagaagaggtatattgccaacctttttttcctgaataatgagggttttcccattctaaagcattcgtataggccgctacccagtttacatgttttaaaatatctgggtgttttaaacgcgtctgtaataaactacgatagctatagacatacacattttgataacccgcctgcttcatcgtgtccatgtacttgttgatgattttaacccaagtgcctgtatcacttggagctctcttgctcttatttacatattcccaattctcaacatcataatagatagggtaagacaggttcatattgtatttctttataagttcaatggtctgtttagcgtcactctcagcatcggtctcattttcagcataggtatagagatagacaccataaggaattcccagacggtttaactccttaatgttatgcgccaattccttgtcttctttaccgctataacctagacgaacaatgacaccatccacttcgttctcatcaataacctttttccaatcattgatacgaccattgtgctcactaatatcaatgactttcttagcatgttcggttcccacttgttcttctctattattaaagaaatagcgcttaccatctctgtgaacccagccgacattcaaatcttttttttctttgagctcaccagaggccgcaaagatatagcgagtaccatccataatcacttcgtcagtcgccatggcaccacttccagtcaaatagtagttgccttgccactcattccgagccatatagccccacttcttgaaatagtaccatttgccgcccactttttgccactcttggttagcataagttccatcggattttagataaaaataagcagaataggctggatcatagagccattcattttgcatcatagctccttgaccattcaagaaataacttccttgccattggcttttagccatgtaaccccacttcttgaagtagtaccacttatttccaatcaattgccattcttgatgagcataagccccatctgacttgagataaaaccaactcttgtaattactgtcatagatccactcgttttgggccatatatccacctgatttcaggtagtaatttccatgccattcattctgcgagtaacgaccatctgaattaatataaaaccaagccttatagtagttgtcaaaaatccattcactttgagctttagaaccatcatcctttacataataatccccatcccagtgggcagcagcattagtctgtacttctgcgctcgtttgcgttttattagaagactgattttgctctgaactacttgaagctgtcgttgtatcctgcgaagtttttgctacttcagtttcatttgcagcgacatgactagttgccaagcctagtaaacagatacttgctaatccaatttttgttttcaatctttctctcctataaaaaatgtaacagacatctgaatgctgttccacctagcttttgctacttactgattattttacaaagtcaagcaaagccaagaagctttcagcttcaagtgacgcaccacctacaagggcaccgtcaacgtctgggcaagccatgtatgaagcaacattttcaggtttaacagaaccaccgtattgaacacgaactttgtctgcgacttcttgaccaaagtcagcagctacaacgtcacgaacaactttacacattttttgtgcatcgtcttgtgaagctgatttaccagtaccgatagcccagattggctcataagcgataactgaggcagcaacttgttcagcagtcaatccagccaatgcagcagatacttgagcacctacgaattcagcagctttaccagcttcgtaagtttcaagtgattcaccacaacagatgattggaagcataccgttcgcaaagattgcttttgcttttttgttgatatcttcatcagtttcatggaagtagtcacggcgttctgagtgaccgataacaacgtagtcagtaccgatttctttcaaaacttgtgggctagtttcaccagtgaaagcacctgcattttcaaagtagcagttttgagcagcaactttaaggtttgagccttttgcaacagcaagaacagttgtcaaatcaagagctggagcagcgatacctgcttcaacaagatctgatgaaggaagttttgatgcaactgcttcaacgaatgctttagcttcttctggatttttgttcattttccagttaccagcgataaatggtttacgtgacatttcacatacctcttttttcaatttattttctatttattctatcacaattatacacagcttgcaaatcttactcggatttcaagcctacttgcatggattaatccttccagagatccatggcatttatgaaatctgcagatacctgtgtcaactgaggattgcttgcttctctttctgctctcttggcctcaatttgagccacactcttgattccttcatggcgccagtttctcaaaatcgcctgaatgtacttccagtttggttttccattcaaaacagcttcacgaagagcctccttaatcaagtcagcactggttccatcttcctttagtgtcttggtcaaatcctcaatctcaaaaggcgtcaacaatcgtcccaactcctgctggaaggtttccaccaaatccttgagctggttttgaggtgttagctggtctgaacttgaatgaactgctccaaacaggtcatccaaacgttccaaggccaaactagcatcaaagagcaattcaatttcgccatttaattcgatagtacgatactggagcagtcccctttccgtcagattagaaatggactggttgacatccgaaatttccttgccaatcctttcagcaatctggcttggcgacatttcttctaagcctgtcgtattttgcaaatagaaaaattgccaaaccagaaaatcgtcgctagaaggaaagagttccttaaaatgcaagagcagggcactcggtaaaaccaaggtacctgatttaaaagcgtctaaatatgtcataattcctcttataaatacccatatgcagatgcatcatcttctatctttctccaatcaaaaggcgtctcctgatagaccgcatggtctacccaattactgaaaaagagggctgcagatgaagaccaacaaagacaaggtacctgattaacatcatcatctttaaagtaattttctggaatatgtgggtcgaaacctgcatcacgatctcgaaaatactcttttgccaaggtatcacggtcatactccaaatgaccaaaactataaatttctcgtaaatcacgactggccaaaatagaaaccccaacctgaggtccttctgataaaatctcgagattggtcttgtttaagacctcttccttagaaatctccgtgtgccgtgaatgaggggatacatagctatcatcaaagcctctaaatagaaggtgaccctcttttagggtgtcctgaggataaatacctgatagcttactgtccatctggtatttttctacaccatagcgcagataaagcccagcctgagccccccaacagatatgaagggtcgaatagacatgagtcttagaccactcaagcatctgtctaaattcctcccaatagtccacttcctcaaatggtaaatgctcaactggagcacccgtgatgatcatcccatcaaaatactcatccttgacttcaggaaaagttttatagaaggtctccatgtgctctgaacgagttgttttagaacggtggctctccatatagagaaaatcaatatccagttgtaggggtgtattagccaagtggcgcaacaactgggtctctgtgaccattttctgtggcatgagatttaaaattaaaatcttcaaaggacggatatcttggtgggcagcacgttgatcatccatgacaaagatattctctgtccgtaaaatctcaacagctggcaattttttatcaattcgaatcggcataaccctctcctaactgtactctttcaggaataattgcatatgtttgaagacaaatctcaaacacttagtccttttattatactgcaagaagatatagttttcaattatagtttttctctaactagttatagtctatttttatatcctagtgtagagaaaacagccctagggactgttttcattaataatgcataagaactttgtagtcgtagtcaccaattttttcacggccgttcaattcatccaattcaacaaggaaggcacaacctgccataacaccaccaagtttttcaatcatctcgatagttgccttaacagttccacctgtcgccaaaaggtcatctacaataagaacacgttgacctggcttaatggcatccgcgtgcatagtcaaggtatcgacaccgtactctttttcatagtcagcagaaataacttcgcgtggcaatttacctggcttacgaacaggcgcaaaaccaattcccaactcaaaggcaactggacaacccacgataaatccacgagcttcaggtcccacgatcatgtcgactttcttgtcagtagcatactgaacgatttcacgaacagcgtagctataagcatttccatcagccatcaaaggactaatatcacggaaggtaatgccttcctttggataattttcaattgttgcaatgtaatcttttaaattcatctttttctttctttcaaagttttttactctctattatagcatattttttaagaaagaaaaaaggaaaagttaacttcaataattatctaacgttttgacgatttataactagccatcgcaataaagcccaatttctgtttattcttagcaaacattttatacatagttaaaaactgctttctattctcctttttacaagcatttacacaaattttcaaagttcctagcaaaccttcgtcataaatcatacccgataatttcattaatgtcatttcaccagtcaatgctttcacatcacaataacctgattctatcatcacctgttcccaaccatcttgagttaaaggacctacatttacatgaattgcttgtgataattcctgtctgatagactctttagcttccttaagaagcacatcatgtgtcaagagaagacctccaggttttaatacccttagatattccattacacattttttcttagcttgatcggcttgcatagtcagcatagcttcatttataacaatatcaaaactagcatcttgataaggaagtttcattgcatttgctctttcaaaactgattaaatgagcaacacctgccgttccagcagattttttagccacttctaaagcttgagcatccatatcaacagcagttatcttgcaaccaaaacgctgtgccaactcaattgctgtagttcccctattacacgcaacctctagtattctcttttcttttgaaaatcctccttctgcaattaaccaatctgtggcacgctttccacctggacgtaagcgttttttccccaattttgctaaaaacttatgacctgcttctgacatttgaacacctctgttttttcttcattataacacaaaatgatattatctgacaattctaatctattatttgataaactagaatcaaaagcatacaagtcaccataactatagcataaatttattattacctctctagttcgaattcaattgctcacgtagtttacgcatatagcttcacttgtagatggtacccacaaataatactcaatggaaatcaaagagcaaactaggaaactagccgtaagctgctcaaagtacatctttgaggttgcagataaaactgacgaaatcagtaatcatacgtacggcaaggcgacgttgacgtggtttgaagagattttcgaagagtattaaagagcatcacaatatagatgcataatatgacttctctagcaaaaaggagagaagcattttgtttctctccctagattaactgatatctctccactacaattgataaagagatatcttttcttgtagtgctttgaattttatttattttagtagattgttttttcagtttctacatcgaagaagtgtgctttgttcaagtcaaatccaagctcaactgttgcacctgtttgcaagtagtcacgagcatcaacttttgcaacaaactcgtctttaccaacttgacagtaaaggtgagattctgaaccaagcagttctgatacagagatagtcgcttttacaacacagtctgggaatgtttcaaggaaagcaggttctgcattcacgtcttctggacggataccaaagatcaattcttttccttcgtagcctttttcacgaagaactttcaatgctccttctggcactttcaaacggaaaccgtcagaaacaatttcgctaccaaccaatttcacggtgatgaagttcatagctgggcttccgatgaatcctgcaacgaatttgttaactggatttttgtaaacttcttgaggagtaccgatttgttctacacgtccgatagtacctgtaccagcagggttcttagtagctgacataataacgatacggtctgcaagtgtcatcgcttctgtttggtcgtgagttacatagatagttgtagctccgatacgacggtgaattttagcgatttcagcacgcattgatacacgaagtttggcatccaagtttgacaaaggttcgtccatcaagaatactttcgcatcacggacaatcgcacgccccatggcaacacgttgacgttgaccacctgaaaggtcagctggtttacgttccaagaattctttcaatccaagtatttcagctgcttcttgaacacgtttgttaatgtcttctttgctgtatttacgcaatttcaaaccgaaagccatgttgtcataaacagtcatgtgtgggtaaagagcgtagttttggaataccatggcgatatcacggtcttttggagctacgtcgttgacaactacgccatcgatagatgcagtaccttctgtaatgtcttcaagaccagcaatcatacggagtgtagttgatttaccacatcctgaaggtcctacgaaaacgataaattctttatctttgatgttcaagttgaaatcttcaactgaatagtgttcgctgtttggatattttttgtaaatatttttaagattcaattctaccatgaggtgaactccttttgtcttttgataattatattatatatgaaaacgctttatatttctatggcaagatgaccaaaaaaataaacaagttctgtgcaacttgcacaaaactttagagaatatcggagaatttgaagaagataatctttattattcttctatagacaaaagcagaaacaaggatcagttttcccatattttcgggctctataatatttgtagtgggtaaatcccctatggatattatggagcttatttttgtgtagaaaaaaagtcccatatgacctataatgaaaagcgacaaaacaactcattagaaagaatcatatggaacaattacattttatcacaaaactgctcgatattaaagacccaaacatcaagattctagatatcatcaatatggatacccacaaagaaattatcgctaagctggattatgaggctccatcttgccctgattgtggaagtctaatgaagaaatatgactttcaaaaaccgtctaagatcccttacctcgaaacaactggtatgccttctagaattctccttagaaaacgccgtttcaagtgctatcactgttcaaaaatgatggttgctgagactcccctggtaaagaaaaatcaccaaatccctcgtatcatcaaccaaaaaattgctcaaaagttaattgaaaaaatttctatgactgatattgcccatcagctggccatttcaacttcaactgtcattcgcaagctcaatgactttcactttgagcatgatttttctcggcttccaaagattatgtcttgggatgagtatgccttcactaagggaaagatgagtttcattgcgcaagattttgataatcttaatattatcactgttcttgaaggcagaacacaagctgtcatccgaaatcactttcttcgctacgatagagccgttcgttgtcaagtgaaaatcattacgatggatatgtttagtccttactatgacttggctaaacagctttttccgtgtgctaaaatcgttctagatcgtttccatattatccaacatctcagccgtgccatgagtcgttttcgtgttcaaattatgaatcagtttgaacgaaaatctcatgaatacaaggctatcaagcgttactggaaactcatccaacaggatagtcgtaaactcagcgataaacgtttttatcgccctacttttcgcatgcacttaacaaataaagaaattcttgacaagattttaagctattcagaagacttgaaacaccactatcagatctatcaactcttactttttcactttcagaacaaagaccctgagaaatttttcggactcattgaggacaatctgaagcaggttcatcctctttttcagactgtctttaaaacctttctaaagaacaaagagaaaatcgtcaacgcccttcaactaccctattcaaacgccaaattggaagcgaccaataatctcatcaaacttatcaaacgcaatgcctttggttttcgaaactttgaaaacttcaaaaaacggatttttatcgctctgaacatcaaaaaagaaaggacgaaatttgtcctttctcaagcttagcttttcttcaacccactacagttgacaaagagcctattttcgctgattctccactacatttgactggattctaattttttagagaaatacaaaagagctagctttagctagctcttttcctatgcggagagagggacttgaaccctcacgacctaaagcggtcacaggatccttagtcctgcgcgtctgccaattccgccatccccgcgtcgattactttactagtatatcaacttttgggatgcttgtcaacactttttttcaaattttttcattttcaccaaccaggttactcaaaaagttcatttagattttcatctactaacttagctccgagtgtatttttgaaatgacctagggcaaattgatgattttcaggccagatggaagcaacagctggtttaacaatctcgatgtcatatcctagattataggcatctatagctgtatgtaggacacagatatccgtcaagacacctgttaagataacggtagacactctacgctctctcaaacgaatatctaggtcagtccctgaaaaagctgagtaatggcgtttatccatccaaaagacacgactgtctgaaccatgctcttgataaaagatccccaaatctccatataaattccgtccactcgtcccaatcagattatgaggaggaaataacttactttccggatggaaacaatcgttttcttcatgagcatcaatagtaaagaagatataatctcctcgttcaaaagctaatcgagttaccttgctgatggcatccgaaatcgcctgagctggagcacctgctgttagtttcccactatcagcaacaaaatcttctgtataatcaatcgaaattaaagcctttgtcattagtaatctcttttcttcacttcttcaaaaatatctgaaatcaagaccttaagataggttcccttcattccaagtgagcgactttcaataatccccgcagactcaagtttacgaagagcattgacaatcacagagcgagtgattccgatacgatctgcaatcactgacgcagtcaacttcccttcatttccatttaattcccctaaaattgctgaaacagcacggagttcggagtaagaaagggtattgaccgccatggtgacagcagtacgacgacgaatatttttctcatcttcttcacgttggaagttaagaagctgaatcccaacaacggtactggcaatctcaacaagaaccaagtcctcatcttcgaattttttatcattacgccaaataatcaaagaaccaaggcgaatccccgatacatgaatcggtgcaatagtcgtcaagccatctggaaaatcatctctactctcaatagggaaaatactcatatcatgctcaacaggcaagtttgcttctgtttcgtaaatcatattagccccttgaacgtagtcatctgggaaaatcttagtttggaagaattgctctacgcgatctgtatttgttttataacgcataaaatagccaagcagacgtcccttactattgataatgcaggcattgcaatgaataatatccgctaactgacgcgtaatagcgttgtaagggagctcatcctgcaactgctcctctgagcgtttcaaaattgatgtaatttttctagttttttctaataaatgtgccatttttcacctcgaatttaatcgctatcattataacataaaaacgtctctttttcaataattatctgaaaattccttattgacttgcattgacttacaatttaattaaaaaccagaatatttttaattaaattgttccttttctattgacaagttgcctatttttgtgtatcataatattataaaagataatataataattttatttgtcttttcacattcggtctccttatataaaaaagcgattcattttgaaccgctttttcttatttatcgcctttgttacgaataacaaagcctgtttgcttttcgcttaaagtattgcgtggttttttattatccttacggtaacgtttttccttatcaaaacgatcgttgccacgacttccttttttgaactcatcacggcgaccattgccacggcgatcacgctctcgacggtcgtccccacgacggcctccacgacctcccttagctttaccaccgaaaccattacctgatggtttaaacggtagtggtttttcacgtgcaatctccacttctggaaggctatctgggtcttggactgtcagactcaagatatacattgccaattcttctggagtaaactcagcagccaatttgcgagcatccttaccaaatttctcaaagttggcacgaatggtttcatctgcaaaatcacgttcgattttcttgagagctacctgtttttttgattggaaggattcttctacacttgcaggtttgagacctttcatgcgtttcttagtcaagttttcaatgatttgaaggtaacccatttcgtttggagcaacaaaagtaatagattgacctgacttaccagcacgacctgtacgaccgatacggtgaacataactctcaggatcttgtggaatatcgtagttgtagacatgggtcacacctgaaatatccaaaccacgcgctgcaacgtctgtcgcaaccaaaacatcaagattgccatttttaaagtcacgaaggacacgaagacgtttgttttggtctaggtcgccatgaattccttctgcacggaagccacgaattttcaaaccacgagtcaattcatccacacggcgtttggtacgaccaaatacaatagcgagttctggttgtgccacatccatgagacgagtcatggtgtcaaatttttcttgttccttaacacggatatagtactggtcaaccaattctgttgtcaattccttagccgcaatcttgacatgttcaggggctttcataaactgaacaccgatacgtttgatggcatctggcatagttgctgagaaaagcaaagtttgacggttctcaggtacacgggaaataatggcttcgatgtcttcaaggaagcccatgttaagcatttcatccgcttcgtcaaggataagggtttcaatgtcttgtaatttcaaggccttgcgtttaatcaagtccaagaggcgacctggagttcccaccacaatatgggcaccagatttaagagccttaatttgtttttcaatgcttgatccgccatatactgaacggactttgactcccttactacgaccaaagcggaagagttcttcttgactttggacagctagttcacgagttggagcgatgaccaaggcttggatagtcgcttcttctgtacggattttttcaagggtaggcaagccaaaggctgcagtttttcctgtaccagtctgagcttgaccgataacatccttgccttcaagggccaaaggaatagtttgttcttggataggactagcttctacaaaaccagctttttcaatttctgctagcaaatcagcagacaagtttaattcattaaatttcacgttattcttctttctaaaggtggtgcgaagccaccctatagggcttagtttatacttttctttttatgacgtattttcatataactagatataaaatcgtgttgcttcttttccacaaaagaaaagtactgttttctttgcaacctatctagtataacacaagaccagagcaaaagatagccccatttctacagaaaatcatgtaagcgctttttgactttcttttttgattgaacgacctagataataagacaaagccaaggcgatactgtataaaatgagaaaaacgaacaaggtttgtgtgtacgaatgagccattttataagtctctgctaataaaataggtcccgctaaaccagccattgcccaagctgttaaaatataaccatgcagagcggccaattccttggttccaaaaatatcactgagataagctggaatcaaagaaaaaccagctccatagcaagtcatcaaaatagacatagcaactacaaataaaacggaatctgtaaagagccaaagtgagagagaaaagaaaagattgacaagcagtaatatactaaaggttagagggcgaccgatatagtcagacaaactcgcccagagcaagcgaccaaatccattgaaaatccccaaaacacccaccattactgctgcatgacttgtagacaagccagccatctcctgtgccattggcgatgccgctgaaattaagcctaaaccacaagctatgttgataaagaaaataatccaaagcatataaaaccgattgctttttagagcctgatttgcagccattccttgcgtcaaagaggctgttttttctttccctgaagaagataaaattgcaagctcttgctcatttggacgcttaatgaattgtgaagctaggagcatgataataaagtaacttgctcctaaaatataaaaagtttctacaagccctacccctgcgatgaggtgttgcgctatgggactagtcaataaagaagcaaaaccaaaccccataatcgctaaacctgttgcgagaccacgtttatcaggaaaccattttataatcgtcgacacaggggtaatatagcctgctcccaaaccaagcccacctaaaatgccataagcgagatacaacaaccacagctctgacggtctattgcaaatcctgttaagatatttccacctgcgtatagaaaagcagatagacttcccatgactttcggaccaaatttttctaccaaacgccccataaatgcagccgataagcccaaacaaaagattgctagactaaaggcgaaggcaacagaagcctgatcccatcccgttttttcaataatagggttacgataaacactccaagcataagtcgaacccagcattaagtgtaaaatgaccccagcaaaggcaataatataacgattcgatttcataaaacctcctattttcgaacatttattctatcttatataaaaatagataggattttagtttatcaagcttgtcaaaaaattactagttttttgtctggaaagcgtttttatctttttctgtcttttccgtagcagaattgtgcaaaagtttttttcttgtgctagaatgaaattcgaataggaggaagataaatgttaacatacgatttaattgttattggatttggtaaagctggtaaaacactagcaggtaaattggcttcagctggcaaaaaagttgccctcgttgaacgcagcaaggctatgtacggtggaacttgtatcaacattggttgtatcccaactaaaaccttgctagttgctgctgaaaaggacttgtcttttgaagaagtcattgctactaaaaacacgatcactggtcgcctcaacggtaaaaactatgcgactgttgctggtacaggcgtagatatctttgatgcggaagctcacttcctttcaaataaagtcatcgaaatccaagctggtgatgaaaagaaagaactgactgctgaaacaatcgtcatcaacactggtgctgtttcaaacgtcttgccaatccctggacttgctacaagcaaaaacatctttgactcaacaggtatccaaagcttggacaaattacctgaaaaacttggaatccttggtggcggaaatatcggtcttgaatttgccggcctttacaacaaacttggaagcaaggtcacagtcctagatgccttggatacattcctacctcgtgcagaaccttccatcgcagctcttgctaaacaatacatggaagaagatggcattgaattgcttcaaaatatccatactactgaaatcaaaaacgatggtgaccaagtgcttgtcgtaactgaagacgaaacttaccgtttcgacgcccttctctacgcaactggacgcaaaccaaatgtagaaccacttcaacttgaaaatacagatattgaactaactgaacgtggtgctattaaagtagacaaacactgtcaaacaaacgttcctggtgtctttgcagttggagatgtcaacggtggccttcaatttacttacatttcacttgatgacttccgtgttgtttacagctaccttgctggagatggcagctatacacttgaagaccgtctcaatgtgccaaatactatgttcatcacacctgcactttcacaagttggtttgactgaaagccaagcagctgatttgaaacttccatacgctgttaaggaaatccccgttgcagcaatgcctcgtggtcacgtaaatggagaccttcgcggtgccttcaaagctgttgtcaatactgaaacaaaagaaattcttggagcaagcatcttctcagaaggttctcaagaaatcatcaacatcatcactgttgctatggacaacaagattccttacacttacttcacaaaacaaatcttcactcacccaaccttggctgagaacttgaatgacttgtttgcgatttaagttgagatttaatcgtatcgaacagccctctttgggctgtttttacttctgcggaatctcaaatctgtctttctcctcttttatgatataatagaaacatgaacttaaaaactactttgggccttcttgctgggcgttcttcccacttcgttttaagccgtcttggacgtggaagtacgctcccagggaaagtcgcccttcaatttgataaagatattttacaaaacctagctaagaactacgagattgtcgttgtcactggaacaaatggaaaaaccctgacaactgccctcactgtcggcattttaaaagaggtttatggtcaagttctaaccaacccaagcggtgccaacatgattacagggattgcaacaaccttcctaacagccaaatcttctaaaactgggaaaaatattgccgtcctcgaaattgacgaagccagtctatctcgtatctgtgactatatccagcctagtctttttgtcattactaatatcttccgtgaccagatggaccgtttcggtgaaatctatactacctataacatgatattggatgccattcggaaagttccaactgctactgttctccttaacggagacagtccacttttctacaagccaactattccaaaccctatagagtattttggttttgacttggaaaagggaccagcccaactggctcactacaataccgaagggattctctgtcctgactgccaaggcatcctcaaatatgagcataatacctatgcaaacttgggtgcctatatctgtgaaggttgtggatgtaaacgtcctgatctcgactatcgtttgacaaaactggttgagttgaccaacaatcgctctcgctttgtcatagacggccaagaatacggtatccaaatcggcgggctctataatatctataacgccctagctgctgtggccatcgcccgtttcctaggtgccgattcgcaactcatcaaacagggatttgacaagagccgtgctgtctttggacgccaagaaacctttcatatcggtgacaaggaatgtacccttgtcttgattaaaaatccagtcggtgcaacccaagctatcgaaatgatcaaactagcaccttatccatttagcctatctgtcctccttaatgccaactatgcagatggaattgacactagctggatctgggatgcagactttgaacaaatcactgacatggacattcctgaaatcaacgctggcggtgttcgtcattctgaaatcgctcgtcgcctccgagtgactggctatccagctgagaaaatcactgaaacgagtaatctggagcaagttctcaagaccattgagaatcaagactgcaagcatgcctatattctggcaacttatactgccatgctggaatttcgtgaactgctggctagtcgtcagattgttagaaaggagatgaactaatggtttatacttcactttcctcaaaagatggcaattacccctatcagctcaacattgcccacctctacggaaatctcatgaatacctacggggacaatggaaacatcctcatgctcaagtatgtggctgaaaaactgggagcccatgtgaccgttgacatcgtttctctccatgatgactttgatgaaaatcactacgacatcgcctttttcggtggtggtcaagactttgaacaaagtatcattgcagacgacctacctgctaaaaaagagagcattgacaactacatccaaaacgacggtgtagttctggctatctgcggtggtttccaactattgggtcaatattatgttgaagcttcaggaaaacgtatcgaagggctaggggtcatgggacactacacgctcaaccagaccaataaccgttttatcggtgacatcaagattcacaatgaagatttcgatgaaacctactatggatttgaaaatcaccaaggtcgtaccttcctctctgatgaccaaaaaccgctgggacaggttgtctatggaaatggaaacaacgaagaaaaggtcggtgaaggggttcattataagaatgtctttggttcctacttccacgggcctatcctctctcgtaatgccaatctggcttatcgcctagttactactgccctcaagaagaaatatggtcaggacatccaactccctgcctatgaggacattctcagccaagaaatcgctgaagagtacagtgacgtcaaaagcaaggctgacttttcttaaacaaaggaaaatgatatcaaagaactccgttatcttgtcggagttttttgtcttttcttttacccttctcccttgcattttctctcattttttgccaaaatagaggggtagaaagaaggtagcatatgtctaaattacaacaaatcctaacatatcttgaatcagaaaaactagacgtcgctgtcgtatctgaccccgtcacaatcaattacctcactggtttttacagtgatccccatgaacgccaaatgttcctctttgtcctagcagatcaggaacctctcctctttgtcccagctcttgaagtagaacgtgcaagtagcaccgtttccttcccagtagtgggctatgtcgattctgaaaatccatggcaaaaaatcaaacatgctcttccacaacttgacttcaaacgtgtcgctgttgagtttgacaatctcatcttgaccaaataccatggtttgaaaacagtttttgagactgctgagtttgacaacctcactcctcgtatccaacgcatgcgcctcatcaaatcagctgatgaagtgcaaaaaatgatggttgcaggtctttatgctgacaaggctgttcatgttggttttgacaatatttctcttgataagactgagacagatatcatcgcacaaatcgactttgccatgaaacgtgaaggttatgaaatgagctttgataccatggtcttgactggtgataatgctgcgaatccacacggcattccagcagctaataaggttgaaaatgatgctcttctcctctttgacctgggtgttctggtcaatggctatgcgtcagatatgactcgtacagtcgctgtcggcaaaccagaccaattcaagaaagatatttacaacttgactcttgaagcccaacaagctgctcttgactttatcaagccaggtgtgactgctcatgaagtggaccgcgctgcccgtgaggtcatcgaaaaagctggttatggtgagtacttcaaccaccgtctcgggcatggtatcggtatggatgtccatgaattcccatctatcatggaaggaaacgacatggtcatcgaagaaggcatgtgcttctctgttgaaccaggtatctatatccctggtaaagtcggtgttcgtattgaagactgcggtgttgttaccaaggatggcttcaacctctttacaagcaccagcaaagatttgctttattttgattaaactatatagcccctatgctttcctttcaaaatatctaggggctattttattgtcatttttctgctattatgctaaagaaattggctgcaataatctaaccctaagtgtctggaatgataacgagggtgctctccgcttttatcaaagacaagggatgaaaccccaagaaacaacaatggaaatgataattgattaagaagtcatctatcaaaagatgttagaaaaagttcaatttcactagaaaatgaggaaaatctccccacaataaaacgcatagtatcaggtattgtgtactgaccccaaacagttagacaattaatttatccgaaggatttagttctgtactgcacaggactaagtccttttagttttaccttaattcgtttgttgttgtagtaatcaatatagtctataatgacttgttccaattggttaagtgatttaaatgttttctcatagccataaaacatttcggattttaaaatgccaaagaaagattccatcataccgttgtcttggctgtttcccttgcgtgacatagatgcttgaattcccttattctctaggaaccgatgataagaatcgtgttggtattgccagccttggtcactatggagaatcgtattctcgtagtgcttctctttgaatgcctgttccaacattgtttgtacttattctaaattaggcgaacaagaaagattaaaagcaataatttcgctgttaaagccatctaaaactggtgataagtaaagcttttgagtacttgctggaatggcaaattcagtcacatctgtgtagcacttttccattgttttagagccttcaaattgggcttgaatgagattctctgccttcttaccaacgtctcctttatgagaagaatattttcgtttctttcgcattttagcttgtaaattgagtactttcatcaagccttgaactcttttatgatttaccagataaccacgatttcttagttctaaatgaacccggcgataagcataatttcccttgtgttcgataaagatggattgaatttcagttttaagctcttggtctttatctgttttgtctagctgtttcaagtgatagtagtaggtccaacgagctagtttaatggcttctagaagaagatctaacgaaaactcagtcattaattcttgaacaatttctgtctttcttctttctctttttcctccttcaatcggagttctcttaacttttttaggatggcattctccgctctcaggtactctccctcttgttttctcaacaatagtatacccgtttttcctgtattgtgctagccagttaagaagtatcgtacgacttgggagaccgtattcaagagaaactctatctttagtccagccttcatgtcagactttattaaccccaattattcaccccaaatctaaaaaccatccagaatccttgccttagcttagatcctggatggtttcttttttcacccaatgggtgttttttactagacaaaaaagagtttcccctttatggtataagtgtagaaaaaaacacaaaaagaaaggaaactcacatgaacagtttaccaaatcatcacttccaaaacaagtctttttaccaactatctttcgatggaggtcatttaacccagtatggtggtcttatcttttttcaggaacttttttcccagttgaaactaaaagagcggatttctaagtatttagtaacgaatgaccaacgccgctactgtcgttattcggattcagatatccttgtccagttcctctttcaactgttaacaggttatggaacggactatgcttgtaaagaattgtcagctgatgcctactttccaaaattgttggaaggagggcagcttgcttcacagccaaccttatcccgttttctttccagaactgacgaggaaacagtccatagtttgcgatgcctcaaccttgaattggtcgaattctttttacagtttcaccagctaaaccaactcattgtagatatcgattctacccatttcacaacttatggcaagcaagaaggtgttgcttataacgcccactatcgtgctcatggctatcatcctctttatgctttcgaggggaagacaggttattgtttcaatgcccagcttcgtcctggtaatcgttattgttctgaagaggcagacagctttatcacacctgttttagaacggtttaatcaacttctctttcgaatggatagtggctttgcgaccccaaaattatacgatttaattgaaaaaacagggcaatactacctcataaaactcaagaaaaatactgttctgagccgtcttggagacctttccctcccttgcccacaggatgaggacttaaccatcttgccccactccgcctactcagaaactctctatcaagcaggatcttggtcgcacaagcgtcgtgtctgccagttctctgaacgaaaagaaggaaacttgttctacgatgttatttctctcgttacaaatatgacgagtggaacaagccaagaccagtttcagctttatcgtggacgtggtcaagccgagaatttcatcaaggagatgaaggagggattttttggcgataaaacggatagttcaaccttaatcaaaaacgaagttcgtatgatgatgagctgtatcgcctacaatctctatctttttctcaaacatctagctggaggtgacttccaaactttaacaatcaaacgcttccgccatctttttcttcacgtggtgggaaaatgtgttcgaacaggacgcaagcagctcctcaaattgtctagtctctatgcctattccgaattgttttcagcactttattctaggattagaaaagtcaacctgaatcttcctgttccttatgaaccacctagaagaaaagcgtcgttaatgatgcattaaagaacagtcgagatgaaaaaatcgtgtgacgcaccaagggaggagtctgcccttttgaggaaatctagcgaggaaaaacgatactggaacagcagaaagtaaaactgacctcatgaggaggaagaaagtggctcatgaggtcaggggttttgtaagttacatctagttgagagaggtatgaatgatttgggattaatcatttcttgttttaaatcaggagaatagtaacgattttttccttttttgacgaactctattccgtaacgatcaatcaatttaatcatgtacctaatattagaattgtttatcccaaatttatttgaaagcttctctaagctatatccttgttttctaagttcatagatctgaactttatcatcataagttagtttcataataaaaacaccccaaaagttagattttttctgtctaacttttggggggcagttcattcaacacctgatactatgcgtttttcttatttgaaatactttttactcaacctctttatactcaatgaaaatcaaagtgcaaactagaaagctagcctcaggctgctcaaaacagtgttttgaggttgcagatggaagctgacgtggtttgaagagattttcgaagagtattacttaatcttcttgatactttgactaagaataaatcctacaatcatccctaccatattttgcataaaattcggtagaatttctgggagggctgctgcccagccattcatcaaagcagaacccaaggcgtagcctcctaccatggcaatagttgctaaaataaggcctaaccactgactttttcctttaaatcctgcgaaaaatccctgcaagccatggttgaccaagctaaagaacatccactgagggtagcctgataagaggtcaatcaagaaacttgctagtcctccgactaccgctccttcacgactaccaaagtaaaaggccgcaaagaagacaccagcatctaaaagagttagaattcctgtaggtgttgggatttttaagaaataacctagaaccacagaaagggcggttaatagggatacaagggcgattttagttgtttttgtttgcttcatattgtcttactccatactgatctgcttgtgcaatagcacgataaacgaaagccttagagctttctactgctggcaaaagtttatcacctttaaccaggtgactggcaatgctagaggcaaaggtacaacctgcaccagcattttggccttggataactggattttctaggatagtaaaggtctgtccatcataaaagacatccacagccttgtcctgactaagacgattgcctcccttgataatgactgctggcgctcctaaatcatgcaatttctgcgctgcagttttcatgtcttccaaggttttaatttcctgaccggataataattctgcttctgggagattaggcgtaatcacactgacataagggaaaaagcgaatcaactcttggcagagctcactgacagctacatcatgcgtttccttgcagaccaagacaggatccaacaccacaggtactcctgggcgttgtttgataaagtccaaggccttctcagccacgctgacagtagggagaagaccaatcttaattcccccaaattccacatcacgcaagctatctaattcatgttgaaaaatggtatcatcagttggaaagacttcaaatcctttttctgtcaaggctgtcaaacaagtcactgctacaaacccatgcaagccgttcaaggtataggtagccaaatcagctgacagtccaccaccactaaaaatatcatttccagaaagtgctaaaatacgattattcttcataacgaatctcctttaaatacaaaccatttggtgctgcagtgggacctgcaagttgcctgtccttcttctccaagatgagatcaatctgctctactggcatgcggttgttaccgattttgagaagagtccccaccatattgcgaatctgtttatacaagaaaccatttcctgaaaaggtaaaggtcaaaaattgtcctgtctcatcgactattaaactagcttctgtgatggtgcgaaccttatcctctacactagtcccagaggctgtaaaaccggtaaaatcatgggttccctctagctttttgattgcaatctgcattcgttccacatcgagtgggtagggaaagtgggtggcatagtgacggcgcatcggatttttgggacgtcctctatccacagtaaactcataggtcttgctatgcttggcataacggcaatgaaaatcatctgccacaagctcaatcgaaatcacatcaatatcttcaggagactgggtatccaaggcaaaacggagtttctcctcatccatctgataaggcaggtcaaaatgaatcacctgtcccagggcatgaaccccactatctgtcctaccagcaccgtgaacagtaatggcttgccctttatttaatctggtcaaggttttttcaatttcttcctgaacgctacgcgcatgaggctggcgctgaaagccagcaaaggcataaccatcataggaaatagttgctttatatctcgtcatagcctctattttatcaagaaattagtctgtaaacaaggacctaaaacaaatattgtatgggtataaaaatctcatactcttcgaaaatctcttcaaaccacgtcagtttccatctgcaacctcaacacactattttgagcaacctgcggctagctttctatagtagattgaaataagatatgaacaactctattaggaaagtcaaattaatttctagaaatattttagcagctacagcgtactattccaaactcaatcaactatagtttgctctttgattttcattgagtatcaaaagaaaaacttaggaatcaatcctaagctctcttctgaagtaggtacatgacaaagatagagattacaatcaaccaacctcctaagatactaaagaccaacatcccattgtgagttagtaagccaattgcacctagaacgaatggggtcgtaaaggctccgaaactacagcctaatacagcaaatgaagttgcttgattgaggagtttagctggaattcgttcagagacaagttgaaagaccgtcgtcaagactacactataggcaaatccagccagaacacttcctgctactaccacccacaaggatgaagacaaggcaatcacgatttgccccaagccaaaggtaataccagaccagaggagcagtttctctttaaagatagaaatcaagaaagaaaaactcaccccagccacaatcccgatcaactgcatgatactaagaacaaaactagataactgggcatcccccaatcctctttccaccatcaaacttggaatacggatggtaatagctgtattggtacaaactacaactgccgcttcgatagctaaggtaaaaatcaagcctttcatttctcgagttaaacgacttgcttccttcgctcttttcttgacttctttctttgattttccataagggacaaagagcagataaaggggcagcaccaaaaatccagcactataggctagaaagatagctgtccaaccaaaggccaacaactgaccgacggccaaggtaatgagagaagctccaacgacctctgcagaagcgcgtagccctaacatctgaattcgcctttttccttggtagcgttcactgataatagaaatggccttggcattgatcatcccaagacccaaaccaaagagaagccgtgttccaaagacaaagggataggcttggtaccagaagggagctgtaccgctcaatgataaaatcagcaagcccaaactaatctgtaagcgctcaggaaatattttttctaagaaaccatttagcagtaacatcatcatgattccaaaggaaggcaagctcaccaagagctcaatttgttccttagaataaccctgataatagtcaaacatggctggtagggcactcgaaatggaaaaggaggtaatcaaaacgagggagagagccaaaatgctggcccgttctaaaaattgtttcatgaaatctctttctatatttctcttaatcttctacttttttgatagttatcaaataagcaagaaaagaagaagcctcattggtttgtagactccttcttaaattcgaaaatgaatcccttgtatcttatactcaatgaaaatcaaagagcaaactaggaagctagccgcaggttgttcaaaacagtgttttgaggttgcagatggaaactgacgtggtttgaagagattttcgaagagtattaggatgactttctcttgatttgcttgataaagtagaaaataaatcctgctaccatataggcaacaaagataatcagacaccacttaaacacaacattccaacccttgttcacattcaaaaagaagtaagggaaaggattatccttggcatttggaatattgagttttagaaccaagccattaaaaagagcaaacatcatatacagaaagggtaaaatggtccacactgctggatcccaaatcttgtattgaccctgtttgtcaaaaaagagggtatccgctaaaaaccagatgggaacgatatagtggcaaaggaaattttctagggtatagaaattagtcgcaatgggcgccaagaggaaatggtaaatcacacaggtaatcatgatactcatggtgaccccaccttttaagcgcaagagacttggcctttgccaattttcacctacacggctcataacctttagaagataaagggtaaaaatagttaccaagaggttggacagaaccgtgtaatagagaagcatcccaaaaccaccatgcttagtaatttcaagataaactcccgtaaaagccgctagaaacaagaagatacggctataaaatacaagtttatagtgttttgacatgcttaaatcttcctcacaaactctgatttaagtttcatggcaccaaaaccatcaatcttacagtcgatattgtggtcgccttctacgatgcggatatttttcacgcgcgtcccttgtttcaaatcttttggcgcaccttttactttcaagtccttgatgagagttactgtatcaccatcagccaatttatttccgttggcatcgatagcgacaagaccttcttctacttctgcaacttcagcaggattccactcatgagcacactctgggcaaaccagtagggcaccgtcttcgtagacatactctgagttacattttggacaatttggtaaattgttcatggtttctccttatcatcattcactattctttgaaaatcaaaatttctcgaacagcaactattataccctaaaatcagcattttgacaaatttagaaaaaaaccgatatcaatctatcggcttttctacatttacattcttttttcagcttctgctttgattttttcaactacttcttgaatgttcaaaccagttgtatcaaggtagacagcatcctctgcttgtttgagaggagaagtctcacgatgactatccttgtagtcacgcgcagcaatttccttttttagggtttcaaggtctgtttcaattcccttggcaatattttccttgtaacgacgctctgctctctcatcaacagaagctactaggaaaattttcaattctgcttgtggcaatacaacagttccaatatcgcgaccatccatgacaatcccgccttgctgggcaatttcttgttggagagaaaccagtttctcacgcacttgaggaattgctgcaatagcagaaacatgattggtcacttcattttcacggataggatgggtaatatccacatctcctacaaaaacaagctggtctccagtttctgaacgtccaaagctgattggatgctggtccaacaaggctagaagggcttcgacttcttcaactcctaattggttcttaagagccatataggtcgctgcacgatacatagctcctgtatcaaggtaggtgaatccaaaatccttagcaataatctttgcgaccgtactcttaccgctggaagcaggaccatcaatagcaatttgaattgttttcatatcggctcctattttatttttataacatcacctggattagcaaaccaagatcctgtagccatgtgcccaggattcaaggcctctaactgagcaatggagattcctgcacgagcggcaatagctgcttccccttctcctgcgagaactttaatcgttccttcaggattagcagcttcttctgaactactagaagtagattctggctctgaactctgctcaggctgagaactacttgaagatgagatttgtactacactggcatcagaatcatgaaagccttttaaggctgctgtgcgattactcccccccgatgatagatagatgagaacgatgaccatcaccaccacaattacaaagaaaatactagctaggatcgtcaaaatacgattagccatcctatcagcccctccgtggtttcgatgccgacgctctgctcttgattcttcttgatcatagatatcttcttgccacggttcttttgccataccttactccttgtttttttttacttttcttattacaatataaatatgaacatgaaaatcacacttatacctgaacgatgtatcgcctgtgggctttgccaaacttattctgatttatttgattaccacgataatggaatcgtgcgtttttacgatgaccctgaccaactggaaaaagaaatttctcctagtcaggatatcttagaggctgttaaaaattgcccaactcgcgccctgattggaaaccaggaagcctaaatcaatggcgataatccactccctctagtttagcacatttccatgtaaaattatagtcttttcactttatttttttctgtaaaatcaggaaggtcacttttttctttgataagataaagtggtctttttttagtctctaaataaatcttactgatatacttgccgagaatcccaatggtcaagagttgaatgcctccaagaaagagaataacagccatcagagaggtccaaccagatgtcggattgcccaaaatgagggtccgaaccacaacaaaaaaggtcatcagcagagaaagaaaacaagataggagaccagctacaaaggctataatcaagggaaaatctgaaaaattaataatcccttcaatggagtagaaaaagagttgcctaaaactccaacttgtcttgccagcctgcctttcgacatttggatagtccaaatagtaggttttgaaacccacccaggcgaagagcccctttgaaaaacgattggactcggtcaagcttaaaatggcatcgactacagaccttctcatcatacgaaaatcacggacacccgacggcagagctactgggctgattttttgcatgaggcgataaaagagaacagcacagaaactgcgaaagaagggttctccctcccgactagttctccgtgtcccaacgcagtccaagtctacatttttgtctaatacatttttcatctcaaacaacatactaggaggatcttggaggtctgcatccatcaccaccaccaaatctcctgtcgcatattgcaagcctgcataaagggctgcttctttgccaaaatttcgagagaaagaaatataatggactgccggattttgctcccgataggcctttaagagttccaaggtcccatcacttgatccatcatcgacaaagacatactcgatttctgtttccaaatctggaagtaaagcttccagagcctgataaaaaagaggaagtacttcctcttcgtttaaacaagggacgatgattgaaatcatcatcttagtcttcaaatccatttggatgcttgctttgccaacgccatgcgtcttcacacatttgggtgatgtcgagttctgcttcccaaccgagttctgctttagcttttgccgggtctgagtagcaggcagcgatatcacctgggcgacgttctacgatgcggtaaggaataggacggcccaccgctttttccatgttttggataatttcaagaactgagtaacctttaccagttccaaggttataaacgtttagtcctgaacctttttggatttttttcaaagctgcaacgtgacccttagccaaatcgacaacgtggatatagtcacgaacacctgttccatcttccgtatcgtaatcgtctccaaacacttgcacttgctctaattttccaacggctacttgagtcacatatggcaagagattgtttggaataccgtttggattttctcccaaatcaccactctcatgggctccgattgggttaaagtaacgaagcaagacaacattccattctgagtctgctttgtaaatatcagtcaaaatttcctctagcatgagcttagtacgaccgtatgggttggtcactgaaagtgggaaatcttccaagatgggcactgtgtgcggatccccgtaaactgtcgcagaagaactgaagatgatgtttttacagttgttttcttccatggctttcaaaaggctgacagttccagcgatattgttgtcatagtaggcaagagggatacgtgttgattcgccaacagccttcaaaccagcaaagtgaatgacaccagtcggttcttcctgcttgaaaatatctctgagggtatctgtgtcacgaatatctgcctcatagaaaggaatctcaactcctgtgattccttcaacaacttctaaactcttacgattgctattgacaagattatccaccacaacaacttgatgacctgcttggatcaattcaataacagtgtgggttccaataaaaccggcaccaccagttaccaaaatcttttcttgcatcttttttcctcgattctcagattattttttcttattttaccatttttgacagggaatgtcatttgccatcctaaactacctgataaaatttcagtaaaatgcttatactcttcgaaaatccaattcaaactacgtcaacgtcgccttgccatgggtatggttactgacttcgtcagttctatccacaacctcaaaacagtgttttgagctgacttcgtcagttctatccacaacctcaaagcagtgctttgagtaacccgcggctagtttcctagtttgttctttgatttttattgagtattattcgctttttactcgtttgacatagttttcaattgggtaatttagagggtccaaggtcaactccttgtcttggatcagttgggctagatggtaaccaatgataggaccagttgtgaggcctgatgaacctagtccactggctgcatagacaccagttaagtcaggcacctgcccaaagaaaggagagaaatcactggtgtaggcacggattccaacacgctcagattttgaagtagcttcagccaaaatcagatagtgagtcaaggtggcctcctccatttgttggagcaaggtttcatctaccgtcaaatcaaatcccatgtcattttcgtgggtagcgcctaaggataatttcccacctgcaaagggaatcaaatcccactccccttctggcatgacaacagggtaatcttccatgtcttgggcaagctgataatctcgtagttgtcctttttgaggacggacatccacttcataacctaaaggctctaacatgtcccccaaccaagctcccgtcgccaaaataacctgctcaaactcctcttcaccaatctggtagcctgatgctaacggtgtcagagtcactttttctttgaccagcttgacatgactgacttccagcaaacgagtcactaaaagttggccatctactctcgctccaccagaagcatagagcaggcggtcaaatccctgcaaaccagggaataattcattagctgaggcttggttcagaatggctaattgccctatcaagggagattcttctctgcgctggagggccagttgataaagttcttccaaattggattcatcctttttcaagagaaagactcccgaacgctggtaaaagtcgatttcttgtcctgatttctctaaatcagctaataaatccacataaaaatcagcccccaagcgcgccatcttgtaccaggctttattacggcgtttggaaaaccaaggactgataattcctgctgcggccttggtggcttgaccttgctcatggtcaaaaacggtcacctctaggtcactttctctcgagaggtagtaggcagctgttgctcccacaattcctgctccaataatggcaacttttttcattgtcttcactttctaactagatatgatggaaaggattggttgatgcctgactaggcaagatatcaatagaccaccccttatcttccttccattgactaagaagtgctgcgattttttctacaaaaatcacttcgatatagtgacctgggtccaatgcaagcaacccatcagatagcatatcctgagcagtatggtagtagatatcaccagtgatatagacatctgccccctttgccaaagcatccttatagaaagactgcccgcttccaccacaaattgctactcttgaaataggcttctgcaaatcatcctcttgataatgcaccattcgaaggctatctaggtcaaagacttgcttgacctgttgggccaattcccaaaatgtctgaggctgaatattcccaatacgtccaattccacgttctggacctgtttcctgcagataagtcgtctcctcgattcctagcatctgacaaaaccagtcattgagcccattttcaacgatatcaatattggtatggctgacataaactgcgatatcatgcttaatcaggtcgatgtaaatctgattttgcggacggctggcaagcaagtccttgataggacgaaagataggcgcgtgcttgacgataatcaagtccacacccttttcaatggcctctgccactgtctcttcacgaatatcgagggcaaccatgaccctttggatacccttgtctaaagtgccaatttgcagaccacggctgtctccctccatagaaaattcctgagggcaaaaggcttcataagcttggatcacttcacttgctaacatggagcacctccttgatagcttgaatcttatctactagaacttgacgttcttccagatttttttctgggatttgtccgagggcgaactctagcttctcagcttctttttgccatttttggacaaatactggactgacttctttggacaagaagggaccaaagcgaacatcactggctgatagcttcatttgtcctgcttccaccaccaaaatctcataaaactttccagcttcttctaagatgctttctgctacaatctggaatccatgatcctgtagccagatacgcaagtcgtcttcacgattattgggctggaggatcaaacgctctacattagctaacttccccaaaccttcttctaaaatcctagcaatcaaacgaccacccatgccagcaatggtaatgacagacacttggtcagtctcttcaaaagctgccaagccattggctaaacggacttggattttctcctttaggccgtgagcctcaacatttttaaccgcagactgatagggaccttccaccacctcacctgcaatagcgcttttgatttggcctctctcaaccaactcgataggcagataagcatggtcacttcccacatctagtaaaatagccccctgtgacacaaaggaagctaccaattctaatctctttgaaatcatcttctctcactttccaaaactctattacctcttattataccacatttcaatcttcaacttcccagtaatataagcacctctggcgaaagaagtttcaatgtcctaaagtaataagtgaatccaattgaaagattttaaacaatttgcaaaaatgtcaaaaaataaaaaataaacagtttattcagaaaattcttgacatataaaaacacatggtagaatataattagaaagttagaaaaaataaaagtttgactaaaatttgtatttgaaggtggtgttcagataagaaatttagtcagacgaaccacgaatttgctctatgctttctggaatttatcataacaggaggatacagtcatggaacaaacattgtttgaattagaactacttccagaggaagatatcattgtcacaggtctccctaagtattgttcttttacttgtttaattacaggtcgctagttatattttatataaaataagtagctttacttacggaataggctagtgctgtgtctctagcctattttaataattaggagtttgttatggatttattagagaaagaatgtttaaaatgtgataaaaatttccaacagggtgatatttggaattactattatttatcagataagatgcctgcacaagggtggaaaatacacataagctcccaaataaaagacgctgtaaatatttttaagattgtgtataaactatcccaactaaataattgtagctttaaagttgttaaaaatttagaggaattaaaaaaaattaattcccctagggaaatgagccctactgctaacaaatttataactctatatcctaagtcagaatctgaagctaagagtatgatttgtaatcttacgaatagactgtcagaatttaaggctccaaaaatactatctgactatcaatgtggaatgcattctccagttcattatagatatggggcttttttaaaaaaacaagcttatgatgaaaaaaataaaaaagtcatctatttattgctagatgaaaaaaggaagaactatgtagaagataagagacaaaatttccctagtcttcctagctggaaaatggatttattttcagaagaagaaaaaaggatttattttcaaaccacatgtgaagtttcaagtaaggactctgcaataaataaatacaaaatggaaaaaattattaagagatcaaataaaggaaatgtttatcgggcaattagaaaatcggacgggcaaaaagtaatcatcaagcagtcaagaccttttgtgaattatgatgctgaaggagaatggacagctcttgatgatataaaaaatgaagctcacatgctaaaaaaattagccgataaaagttatactactaatttaactgatgaattttatatcgtggatgattattttcttgttcaggaacaagttgacgggttaaactttgaagaatttattcgagaaacagaacactccttaaatattagagaaaaaacactggataacattgtgaatatagtaagttacatccataaactgggaatataaaattgtagatatagctcctacaaattttatatataccaaaaatgtactgcaccccaaaagttagacaattaatttatccgaaggatttagttctgtattgcacagggctaagtccttttagctttaccttaattctcttgttgttgtaataatcaatgtagtccacaatagcttgttcaaggttttctaaagatctaaagttcttctcataaccataaaacatctccgatttcaaaatgccaaagaaagattccatcatgccgttgtctgggctgttgcccttgcgtgacatggatgcttgaattcccttactctctaggaaccgatgataagaatcgtgttggtattgccagccttggtcactatggagaatcgtattctcatagtgcttctctttgaatgcctgttccaacattgtttgtacttattctaaattaggcgaacaagaaagattaaaagcaataatttcgctgttaaagccatctaaaactggtgataagtaaagtttttgagtacttgctggaatggcaaattctgtcacatctgtgtagcacttttccattgttttagagccttcaaattggccttgaatgagattctctgctttcttaccaacgtctcctttatgagaagaatattttcgtttctgtcgcattttagcttgtaaattgagtactttcatcaagccttgaactcttttatgatttaccagataagcacgatttcttagttctaaatgaacccggcgataagcataatttcccttgtgttcgataaagatggattgaatttcagctttaagctcttggtccttatctggtttatctagctgtttcaagtgatagtagtaggtccaacgagctagtttaatggcttttagaagaagatctaacgaaaactcagtcattaattcttgaacaatttctgtctttcttatttctctttttcctccttcaatcggagttctcttaacttttttaggatggcattctccgctctcaggtactctcccttttgttttctcaacaatagtatacccgtttttcctgtattgtgctagccagttaagaagtatcgtacgacttgggagaccgtattcaagagaaactctatctttagtccagccttcatgtcagactttatgaatcatttcttgttttaaatcaggagaatagtaacgatttttcccttttttgacgaactctattccgtaacgatcaatcaatttaatcatgtacctaagattagaattatttatcccaaatttatttgaaagcttctctaagatatatccttgttttctaagttcatagaactgaactttatcatcataagttaatttcataataaaaacaccccaaaagttagatttttttctgtctaacttttggggtgcagttcatcatttcaacatcctatactatgcgttttttaattttagagaccttctctctagctttcaaaaaacttacaatatcctaagtcaatctgtggatgctgtgtttattgattaaagaaactatctagatcagtagcaaagtgattagcgtacttcgcaaccgtttcagggtatactctattgtgtatactatctactataactttcgtagataaattattacattttcattacagtttttaaataaccaatcatctgattagtgtctatcactacatctgctagtctgacaacagctgtatcttcattgtaattggtttctatagggacttaacttgagcaacgatattctctaccgtaaatccataattatcaatcacagtctgagctggggcagacgcaccgaagatgtcaataccgatgaccgcgccatccaaaccaacatacttgtaccaactttgggtcgctgccatttcaatggccacacgacgacgagtcttagatggtaaaatgtcttccttgtaggtagcatcttgagcatcaaatagttcggttgagggcatagataccacacgtactttaccaccttgtaaaaccaattccttagcagctttgatagctagattgacctcagatcctgtagcaatgataatagtatcaaatcccggggtatcatacacgacgtaggctcctttagcgaccttaccaaagtctgtcccttcttcaactaccaagttttgacgggttaagacaatgacagttggagtggtggtactggtcaaggcatgatgccaagccgcttgagtttcacgggcatccgctggacggataacagtcaagtttggcattgagcgtaaacctgccaaatgttcaactggttcatgagttggaccatcttcaccaacggcaattgaatcatgggtaaagacataagttacaggcaactcctgaatggctgatagccgaatagcagctttgacgtagtcagagaaaacaaagaaggttccgccataaactcgtaaaccaccatgaagagccattccattgaggattgttcccatggcaaattcacgtaccccaaactgaatattgcggtttaatggattatatttatcttgtaagccatctgccttgatgtaggtcatgttagagtgagctaagtctgccgatccacctaagaaggttggtaaaactgctgctgtattaatagcatcttgggacgaattacgagttgcttgagagaagccattctcatagacagggaagtctttttcagtaatggttacaggggattttccagctacaatagcgtcaatctcactagcaacttcgggataagcaaccttgtaatcagacaccaaactagcccaagcatcgtatgcctcctgaccacgatccgctacatttgtcttgaaatcagaatatacttcctctggtacttcaaatggatcgtaatcccatcccaaaaacttacgagttgctcctgtttcttctgctcctagtggtgcaccatgaacagcatttgtaccacttttattgggtgagccgtaaccaattaccgttttcacttcaatcaaactcggtttaccagaaaacttggccgtctcaattgctgtagaaattgctgctaaatctgttccatcttctaccagaactgtatgccaaccataagcatcgtaacggacgcgaacattttcagagaaagtatctttggtctcaccatccaagcagatgtcgttggagtcgtagaggacgataagcttatctaaagcttgatgacctgcataagaagccgcctccgcagacactccttccatgaagtcaccgtctccagcgataacataagtataatggtcaaaaatagggaaaccatctttgttgtacttagcagctaaaaaacgctctgcttgggcgaaaccaacggcagtagaaatcccctgaccaagcggaccagatgtcgcatccacaccagacgtatgcgtcacttcaggatgaccaggtgtcttagatccccattgccggaaatttttaatctcgtccatggatacatccttataccctgttaaatgcaagagagcatacagtagcattgatccatgacccgcagacaagataaagcgatctcggttaatccagtttggctgctcaggtgtaattctaaggtgctttgtaaataggctataagccattggcgcagcacccatgacaattcccgggtgaccagaattagatttgttaatagcatctacgccaagaaaacgaatggcgttaactgattgtagtgacatatattcctcctaactaataaatttcttctcaaaccattatttgattggcattgtttttccggtcatttcttcgtaatctctagaacagatatcccaggctttggcaatatcgtcatccaaaccaaataatccactgcgacctataacataaatatctggtcctgccacatcaatttgtttgaaagtcttacgactcgaagaaccatccatctcaatgatgtagtgataaccattctgaactctaagctgacggagttcttggattttatacaaggtagactccaaaaagcgttgtcctgcaaaacctggatctacagtcataatagttgctttgtcaagtaaatcaatgtagggaaagattgtagaaacaggtgtttcaggattaaggacaacaccagcctttagacctgcatcatgaattttatcaatcaaacgaaaagcaagaccattcagaacttcagcatgaatacaaatatactcacattgtaaatcgagaacttgatctacccaaaaggttgggtctgtgaccatcagatgaactgataaaggtgtgtcactaattttttgaacttcttgaatgaaccaaggagacaaggtaatattgggaacaaaatggccatccataatatcgatatgataagatgctactttatcattcaaaaaagtaatctgctctttgaatttgtccaaatccatggtcatcaaagatggtgaaaattcaattcttgacatcgttaccctcttacaaaatttcaatatctgacaaatcaatctcttcttcaacagtcataactggttctgcatgttttattggttttttcaaaatcgcgtagacaagtcctgtgactacaatgttagctaacaaggcacaaataccagctactggacgagtcatggttggtaacataagcactccaccaaatggcacagcagaatcagcacccattgtcaaagaaacagcaccaccaacagcaccaccgatacctgttgcaatgagacctggaaccaagttattcataacaatcggaattacaccttcaacaatattgacaatccccataggaacagccgatttcaatgtttcgatttcctcttgagtatagatattttttttgagtaatttcgcgataaaataggccaatccaaatccaactggtgtagcagtattcaccaattgtaaagcagtcaatggttctttcacaccttcagcctgtaaagtcaacacaaacgcatagactgttttattaagtgggccaccaaagtcaacagcactgagaattccaataactgcccccatcaaaccatttgaagcacttcccaagctttgtaataagctcgtcaaccagttggtaaaggctgcgataggcgctccaataatataaatcataatcaaactacttaccaaagaggctacaaaaggaataatcaaggttggcattaaacctttaatccagtttggtactttgacctttttaataatcgcttgaaccaagaaaccagctatataacctcccaagataccaccgataaaccctgaaccaacagaattggcaattagaccaacaacaaaacctggtgcaatccctggcttaccagcaatcgagtaagacaaacctgtagcaataacaactggcaagagaccaagggctttaccacccatagttgctaaagcatcccagatagtgaattttcctgctacaagagcgtcaggaacaccaccccccattgctaaaccaatggcaactaagaatcctgcaccacaaacaattggaatcatataggaaatggctgtcaataagtgaccttttaagtttaagtgtttcaacatatattttctccttaaatattttcagttatttcgtaacaatctcaacagctttagcaatcagtttattgggagatttgactgccacttctgttggaaccttgataatctttttaccctcaaagcgttccataccagaaatcttaacatcaactgctaaaataactacatccgctgcatcaatctgctcttgactcaattcattttctacccctattgtcccctgagtctcaacatgaatcacatgtccagctacctttgcggcattctctaatttttcctgtgcaatataagtgtgggcaattcccacagtacaagctgcaacaccaacaattttcatacggataccctccaaaattttttcttattaacaaaaagctgcaatcacatcatcagatgtctgagcccgaactaatttggcaacaacttcgtcattaccaagttttcgagcaaagagtgataaggtcttcaaatgctccctagcagcttctgtatcatcaccaactgcaaagagtacaattactttgacccctttcccatcaatggtctcccaaggaatctcattgtgatttatagctatgactacccccgccttctccacagcagaactcttgctatggggaatagcaatataattcccaataccggtctgtccttctgcctctctctgataaagaccttcgataaattggtctctatcagacacataacccgtctcaaccaatagttgagctaatgcctcaaaaacctcttctttgctctgcatctgtaaatccgtctggatcagactcacattaagaatatctttgatttccatatattatctcccgtaattcttcttttgttaactgttttaattgatttatgaatgattcatctgctagtcttctcatcaatgttttaatacatgacttgtcctgtgatactgcaatggccaaaccgataataaggtcaacacactggatatccttcgaccattctctgataggtgattttaatctagtaatcactaagacatgatgttgaaagtttccttcacaatgtggtagaagaacacctttagcaacctctatacttccctgtctctcacggtaatatagaagctcttctattttttctgtatcttcagaaacaagaaggctgatttgatttgctaattctttgtaggcttcttgacgattttgaacagatatatccataaggacaagcgaaagattattcatagtttatctcctgaatttttgcttgaagacgttgtttatcaccctcggttagaaaaacactaactaggacaaacgggacacttgctggttcctgcaaagctaccgtcgtcacaatgaaatctaaatctggatatagatttatcagctcatctaattgatgataagcaactacatcaataatatccaattcagaaaattgcttttctaatcgtgctcgtaaaagctctgaagttccgacacctgatgtacacatcactactgtttttagaggacgtgctcgcttttcttgaaaccgtgcaaaatataagactagaaaaccaatctcgtccagactcaaggaagcaaaaccaaatactagactcacttctttagaaatagttgttaactctttaaccagattaggataggttaaaagaatttgtgataaaagactattcttaatctgtactctattatctaatctcctcagtaagggactgatatgactcgccaagtcaacaaagtcaggatctgtcgtttcaatctctctattgtccatacacatacggctaaaatagtaatgagtgacatctaaaactcgctgagaaaaaggaagcttcccggaagaaaatggtttttgcaatctcgaagatacaacgtattgataaagatagtcaatctcaactgcatcaaccttcatcctaaaatattgttcaatttcttgaataattttttgacagacactgtaaattttctcatcaacaatagtaggttttgaaggtgctacaacatgaatactagtactacgacgattcctactgataaaaatatacaggtgagagaaaatatttatattatatggatagggaatgtttacccccaattctctctcaagtgtaatcagtaatcccaaacaaaagtgagcaagttctccgtcaagaggctgaaccttattctgtgtaatttgctctaaatccaactgattaaacattggcagtagatttagaatggctgaacgaatttgagcctcatccccatcaataaaaagctttcgttgtctcatttttaaatctaacccataaattgctagactctcttgtaatatctgacgatcttttagtactactgactcgcttacgtagaattcctctcctaaatcataaatagaatgtggcttaggagcagtcaacaagagacgttctagtaatttttcacgccttacttcaggatcaaaagcctctgtaaaattcccatcaacgtccacgagggaacttcttggatttaatttgaaacctctgcctttttcagataaaatgaatgcttctaccggacaatctttgttgattcccttgacaaggcgataaaccgttttatcagagcaatttaatttttctcccaatactttagcagatatataatccttactatctcgcaaaaggagcaacaacgtttccatttgttcttgttttctagacacgatacacctcctttatgaatccattatatcgctttcaaaaaataatatacttcgcattttgtcctttgcaatggacatttttgtttttatcaaaaatatgatatcaaatagaacagaacctcactatgccaaaatcattttaccttttcttcataacatctattttagttgaaatatttaagttgcttttcgtatttgataagaaataaaccaaacgattttctaataaataacactatgttccatttaacaatagatagcatcttcattttcaaactaccaacctatccgaccatttgttctagcaatagaagagagttaaaattacttcaatctgtcgctttctctttcttacatcaaacttcaaatagtctaactacagatatttgaatctattacctcaatccaagcaggcttgagggtcgctcttgggttcaccgatagatgatcggcacgtaggccttgcacatcagatctacgatagatccatcgtataaaaaactgcaatccacagattgcagtctttcttgttgtctcccgaaaaccactagctatgctagtggttccatagagcttttagcgtggtaacaaaaagaacctcctaaaatgataagatagaagtggtttctccgccactacaacatatcatacaggaggtacctcatgagagaggataatcaaagtttatcacataccacatggaattgtaaatatcatattgtttttgcacccaaatatcgtcgtcaaatcatttatggcagatacaaagctagtatcggaagaatcatacgtgacttatgtgagcgtaagggtgtaataatccatgaagcgaatgcttgttcagaccatattcacatgcttatcagtattcctccgaaacttagtgtttcgtcctttatgggctatttaaagggcaagagcagtttgatgatttttgataagcatgcgaatttaaaatacaaatatggcaatcgcaagttttggtgtagaggctattatgtagatacggtaggccgtaatcagaaagtgatagctgaatatattcagaatcaattacaagaagacagagtagcagaccagctcacgttattcgagtcagtagatccgtttactggcgaaataaataagaggaagtaactaaggtgctttagcacctgctcgggaaagtggtgcgcgaggaagctatttcggtgggcctttggccctggccggtagaagcggcttatagccgcagaacaaaccaccagttcacactggtggttttgatttattttttcgcttggtaacgactggtcaggatgaaaatcacggtaaagaccaacatcatgacaccataaacaggcaacgtttgttctgttaaggttgaaatttcaagcagtttttgaattcttgggaagagagctgtggctaggaaacctcctactgaccaaacaatcaagaggacacgccatagggtaaatggcatgcaggctctaaatacggataagaaaccaattgaccccaagagataatagagtagagttgagatttctaactcagaccaaccttgactcgcgccaaacattttcacaaacaggacgctgaagacgaccatgagagcgcttggtagggcacgaagcatggattttctgaggaaattctgctcaacaggtttgatatttcgctcaaaagtcagaacgaatggtgggaaaccttccacaaactggtcaatcatggtaatctggatcggaatgaaggggaaaatcaaaatccactctgaccgacctagtaaagcactggcaatacagatgactgctaacaggaaggaatagatggtctttatcaagaaaatcggggcgatgtgggcaatgttattgaccacgcgacgaccctcgaagagaatctcaggaacatcattaaagtctgagttcaagagaaccagattggcaatctgacgggttgctggatccccctccgccatcacgatagaacaatccgcctcacgaagggccaagatatcattaaccccgtcccctgtcatagccgttgtatgtcccgcttttttcaacgtttggatgatgagtttcttttgatgaggggaaacacgtccgaaaatagctgtctcctccgccatggccatcaattcctcatcggtgatttttgagcaatctacatagctgtgatagtccgcaaaaccagccttctgggcaatgctggacaccgtaactggattgtcaccagagataatcttgagtcccacctcctgagaacggagatagtccagcgtctctgctgctccctctcgaatggggtccaagatttccagcaaggctagagcctgaatatcagatggtttctgtggtttgtgatggtctaatttctcctgactgagagctaagaccaagacacgtgatcctctctccaaggcctccctagcttctgggacttcagaatcaagcaacatctcaggtgcccctaagaaaactgtccccaagccttctaactccatagccccccacttgcggtcgctcgagaagggaagattggaaatcataggataagcaacatctcccacaaaacgctggcgaatggcttgggcagttggattcttatcctcactatgggccatgtagctagtcaagatgctggcaatagcctcttcaccatacgtttccgtcaacggaagaacagcctccacctgcatctttccttgggtgatggtacccgtcttgtccagacagagcatatccacgcgcgccaaggtctcaacagagtacatctcctgcaccaagacctttttcaagcccaacttaatcactgcagtcaagagcgaagtaatggtcaaaagggcaattcccttaggcaacattcccaaaagagctgtcgacgagtttacaacggatgacttgagaggcaggccttttaaaagcaaggcttccagcaagagagccagaccaaagggaatgataatcttcccagtaaaaccagccaacttgtccagcgatttcatgatacgggagttgatgggtttaacggtcttagcctcaagcatgagtttggcagcatagttgtctgcaccgacatggtgaacttgagataaaactgacccactggctaggaaacttcctgacaaaagtaagccgtcaacttccttttgcaccaaatcactttctcccgttaacatggcttcattgacttccgcaaagccttccaaaaccaaggcatcactaggaatctgctctcctgcagacaaacgaatgacatctcctagcactaattcttcaggattaagagcaacttcctgaccatcacggatggttttgaccttttccttggtcatgagattgagcttgtccaccatgtgtttggctcgtagctcggtcacaatcccagaaaaagcgttaaagcagataacagcaaagaagaccagattgctccaagcctgcacaaaggcaagagccaaagcaatggcaaagttcaaagcgttaaaaagggtaaagacatttcgtttaacgatttgccaagtgctggtactggctgatgcggtaaagtcattgaccaaaccctcagcctgtctttccttgacttctctttgggttaatcccataatcttatttttatccataaattctattatatcattttttttaacagaattctaatttcatcctaaatatgtatctagtcaagggaaaagtttgccagccctcctttgataaggtataataataacaagaaaacaatcgaaggagatcgcatgttttatacttatttgcgtggattagttgtattgctcttatggtccatcaatggcaatgctcactatcataatactgataaaattcctaatcaagatgaaaattatattttagttgcgcctcaccgtacctggtgggatcctgtttatatggcctttgcgaccaagccaaaacagttcatctttatggcaaaaaaagaactctttaccaaccgtatctttggttggtggattcgtatgtgtggcgcctttcccatcgaccgtgaaaatcccagcgcctcagccatcaaatatcctatcaacgttctcaaaaaaagtgaccgctctctcatcatgtttccaagtggtagccgccactcaaacgatgtcaaggggggcgcagcactgattgccaaaatggccaaggtccgtatcatgccggttacctacaccggtcccatgactttgaagggcttgattagccgtgaacgtgtcgatatgaactttggaaatccaatcgatatctcagatatcaagaaaatgaatgatgaaggcattgaaacagtcgccaatcgtattcaaacagaattccaacgtctggacgaagaaacgaaacaatggcacaatgataaaaaaccaaatccactctggtggtttatccgcatccctgccctcatccttgctattatcctcgctatcctaaccatcatctttagctttatcgcaagcttcatctggaacccagataagaaaagagaagaacttgcatagaagaaatgaaccttggccaaacagctaaggttttcatttatatagtagattggaactagaatagtacacctctacttctaaaacatttttagaaatcgatttgactgtcctgatcgatttgtcctattcttatttcattttactatatttataagaatctcctaatcaaatcaaaagccactctacaatagagtaactttaagattgtccatttatactcaatgaaaaagccctctgaaaatcagagagctgatttgagctcgggctaaaatcctagtgaaacaaaaaaatctacacgatcagaaaagtctctatcgtgccattttcatacatgatgtatagtccaagtagaatgaatactaagggcacaatgattcgctcgtatttttcaattgtctcgaatattaacggaatagaggataacacccgactaatctcgcaaaagataattatgccgattacaaacacaagcaaggccacgagggtctgtgaccaatctaacgaagcaaaataaggtatatagatacctaaattatctccgccagacgcaattgtcagcaatgtaactgtccaaaacagttgatttgccttgctttgttctaatctttcaataatttcttcctcttcttcttccgcatcttctccaacaattgcaaagcgaatccctaaatagatagggattaaaccaagcaatccaaccatccattcttcaggcacgaaattaacgacataagcagcaactaaactcgcccctacaagtaagcctgtgcctagatattgccccgcataaatatgccatttctgtttattctgtgatagctgtgcaaataaaataattaaaataattaaataatcgatactggtggaaatataaacaccaatagcagatatgattgtctgtcccataaaaaaaacctcctgtattagtcagtaataaatcagcagattttaggagagcacagacacattaatttagctatcgctagtgggtaatatcgaacgtaggaaagcattttactcctcctcaaaacgtagttacaaagtaatttctaactggaattcagtgactacttccatgtaaagtataacatactatactttactttgtaaagagtgggctcttctagggggcttgcatacagctactcggcttgaaaagccgagtaactgcgcacctttatggtgtaattagctgataccgtttgaggtttttgtagtctccaaaattgttaccgataaaacctcaataaaaaagccctctgaagtcagagagctgatttgagcccgggctaaaatcctagtgaaaaagatgaaactccttgtgctcatcgaacactgtgtcatttccctattttcatacggatttttgacgcccttagcatcatgattcttgctagataaatcgtttatagactaggcgacgaggcgaagatcgtacgaaactttcagtgaaacaaaaaaaatctccccgaagggagaaaagctggtttattttaccttacagtgctaggaaccgtaaccaaagattatacttgagtatatcgaggtaaggtgacaacgcaaaaaagctacccaatttagagtagctttattatcaagatatgctcaattgaacacggcctaagcacttggcaaaaaagataaaatctcctagaaactgaagtttcttcgtcaattttcctatttttgctttgtgcttttgacggcctttgtatcttgaattagcgacgaagtcctagagagttgatcaactcacggtaacggttaacgtcgtttttacgcaagtatgcaagcaagttacgacggcgaccgatttttttcatcaatccacggtaagtagcgtggtcttttttgtgttgtttgatgtgttcgttaaggtggttgatttcccaagtaaggacagcaacttgaacctctactgaacctgtatcaccttcgtgacgtgcatattgtgcgatgatttcattttttttctcttttgagattgccatgatgtttctcctttttatttggcttcatccgagtgacaggttggcatgcctgtaaccaagaagaagttatttgtctttacgacaatccctattttaccaagatttaaattttctgtcaaacattaatactctcatagttattatttttcaagtaaagagatacgttcttttatatgatgacctttttcaagttcatctaccaatccaatagcataatctgcataactaatctggcttattcctttttcattagtagtaaaaatttctcctgctagaatgtagtttcctgttttttcaccatcgggaataaaatctacagcaggactgacaaaagtccagttgagattattttttgtacgaagaagatccaattcatccgcttgagcttttgctagtggcttaaattcttcaggaaaatcaggcgtatctaaaagtcgtgtcgtttttgtttcatctatataaagacttcctgctccccctacaactagaaaacgtgtctgtgttccagcaagaagctgattaaatagttcgattgatttgctgtggagcggtagcgtatctggtgtataagcaccaaacgctgaaataacagcatcaaatccagtaagatcatcttttgtcaactcaaataaatcttttttaataatagactcagcttgacttttgttttcagaacgaacaatagccgttacttcatgtcctcgtttgactgcttcttcaacaattgctttccccgcttgtccatttgctgcaataactgctagtttcattttttatacctctcttgttgtaattattttagttacagaaattgtgacactcttaataatcaatgtcaatagtcttgcttaattattatcaaaatatttctaccaagaaaactaaccatgattctagtgaaaaaaaatcttctttgtcaacaaatttactttcttgttttaaacatgctataataatcatagcaagagatctaagttgtctgtttttttaaaacgaggtgattatcatgcgtagattctattcccatctcccctactatctggtcatattattcttttattggccactttatgagttgttcttactagttgtttctgacccccttacactcaagggactctatataaacaatcttctcttctttacacctctggtaatcttgattgtatcgttactctatagctaccgtttccgtttctcactttgatggttagttggtaacggactgctcttttactttactatcataacctttggtgagtttatactaatttacttgctaatctatgaaacagttgctctggtcggcatggattctggtattagcatcaagcatattctacaaaaaatgaaaaacaaaaaactttcacaaaatccttgaaaaatctcacaatcatgctataataatccatagagacaagtcacttagtccctttctactagagagtgcgtggttgctggaaacgcataggaagtctaaactgatactactcttgagttttttatgaaaacataaaacggtggccacgttagagccgatcagaggtgtccctctcttttgaggtacataaatgaaggtggaaccacgttgcgacgtcctttcgaggatgtcgcatttttttattaggatactaattatggagttgcaagaattagtggagcgcagttgggcaatccgacaagcttatcacgaactggaagttaagcatcatgattccaagtggacggtagaagaagacctcttggctttatctaatgatattggaaatttccaacgactggtgatgacaaagcaaggacgctactatgatgaaacaccctacacactggaacaaaaactttcagaaaatatctggtggctattagaactttctcaacgtttggatatagacattctgacggaaatggaaaacttcctctctgataaagaaaagcaattgaacgttaggacttggaagtagtctgctgataaaaaatcaatgcttagaaactatgaaataataaaaaaggagaacatcatgattaacattactttcccagatggcgctgttcgtgaattcgaatctggcgtaacaacttttgaaattgcccaatctatcagcaattccctagctaaaaaagccttggctggtaaattcaacggcaaactcatcgacactactcgcgctatcactgaagatggaagcatcgaaattgtgacacctgatcacgaagatgcccttccaatcttgcgtcactcagcagctcacttgttcgcccaagcagctcgtcgtcttttcccagacattcacttgggagttggtccagccatcgaagatggtttctactacgatactgacaacacagctggtcaaatctctaacgaagaccttcctcgtatcgaagaagaaatgcaaaaaatcgtcaaagaaaacttcccatctattcgtgaagaagtgactaaagacgaggcacgtgaaatcttcaaaaatgacccttacaagttggaattgattgaagaacactcagaagacgaaggcggtttgactatctatcgtcagggtgaatatgtagacctctgccgtggacctcacgttccatcaacaggtcgtatccaaatcttccaccttctccatgtagctggtgcgtactggcgtggaaacagcgacaacgctatgatgcaacgtatctacggtacagcttggtttgacaagaaagacttgaaaaactaccttcaaatgcgtgaagaagctaaggaacgtgaccaccgtaaacttggtaaagagcttgacctctttatgatttcacaagaagtgggacaaggtttgccattctggttgccaaatggtgcgactatccgtcgtgaattggaacgctacatcgtaaacaaagagttggtttctggctaccaacacgtctacactccaccacttgcttctgttgagctttacaagacttctggtcactgggatcattaccaagaagacatgttcccaaccatggacatgggtgacggggaagaatttgtccttcgtccaatgaactgtccgcaccacatccaagttttcaaacaccatgttcactcttaccgtgaattgccaatccgtatcgctgaaatcggtatgatgcaccgttacgaaaaatctggtgccctcactggccttcaacgtgtacgtgaaatgtcactcaacgacggtcacctattcgttactccagaacaaatccaagaagaattccaacgtgcccttcagttgattatcgatgtttatgaagacttcaacttgactgactaccgcttccgcctctctcttcgtgaccctcaagatactcataagtactttgataacgatgagatgtgggaaaatgcccaaaccatgcttcgtgcagctcttgatgaaatgggcgtggactactttgaagccgaaggtgaagcagccttctacggaccaaaattggatatccagattaaaactgcccttggaaaagaagaaaccctttctactatccaacttgatttcttgttgccagaacgcttcgacctcaaatacatcggagctgatggcgaagatcaccgtccagtcatgatccaccgtggggttatctcaactatggaacgcttcacagctatcttgattgagaactacaagggggccttcccaacatggctggcaccacaccaagtaaccctcatcccagtatctaacgaaaaacacgtggactacgcttgggaagtggccaagaaactccgtgaccgcggtgtccgtgcagacgtagatgagcgcaatgaaaaaatgcagttcaagatccgtgcttcacaaaccagcaagattccttaccaattaattgttggagacaaagaaatggaagacgaaacagtcaacgttcgtcgctacggccaaaaagaaacacaaactgtctcagttgataattttgttcaagctatcctagctgatatcgccaacaaatcacgcgttgagaaataagagtctagcataaaagcctccaatctggaggctttttctcatctatttttactcaaggactaagttcacttgagcaaactgaatccgcactgtcgttccttttccgacctcagactcgatacgaatctggtgccccagttcttcagaaattttcttagatagataaaggccaagtccagaggactgctgggtcaaacggccattgtatcctgaaaagccacgttcaaatactcggaggacatcactgttttttatcccgattcccgtatctttgatacaaagctcttggtcatccatataaatctccagaccaccttccttggtgtacttgagactgtttgagatgatttgctcaataaccactagcagccactttttatccgtcacgatttctttatcaaggtcatgtagattgacatttaagcctttttgaataaagaaaagagcatatttacgaattatttccttgaccaagtcctcaatttgaacctgctttaagaccaaatcatcatggaaactttctaaacgcaggtactgtaaaactaggttggtataggagtcgattttgaaaatttcctgttctagctgctgcttcagttggcggtcgaccacttctgcaactaagagttgactggctgcaatgggggtctttatctgatggacccacaaggtatagtaatccagcaaatccgtcagttttctttctgcttttgacctctgctgatagagttccatctcacgcgcttctaatttttctgctaaagctatttccaaaggagacttggcttccctctctccatagagaagttcctggcgatagacctgcgtttccaccaatatgtcccaagtgaaaaataatatggttacaaagcaacacaagaagaaaaagtagaggaagtaaattcctagactggcaaataaaaactgaaagagtaagacaagaaatgccaaagaaagcagatagataaaaagacgactacgggagcgcagataggctagaaaaaattgtttccaatcaagcatgcttcaatccgtaccctattcctttcttggtctcgataaatcctaccaatccctgctcctccaactttttacgcaaacgagccacattgacagagagggtattatcatcaatgaaaaagtcactgttccaaagttcccgcatcaggtcgtcacgtgctacgatgttgcctgcatgctcaaataacacgcgtaaaatctggaattcattcttggtcaaattcaagacttgcccttgataatgtaaatccatggatttggtattgaggataacaccagcatattccagcaaactctcatcacgcccaaactcataggaacgacgcaacaagccctgaaccttagctaaaagaacctgctggtcaaaaggcttggtcacaaagtcatccgcccccatattgattgccatgacaatatccatagcctggtctctcgaagaaagaaacatgataggtaccttggaaatcttgcggatttcctgacaccagtgataaccattaaacaagggcaaaccaatatccatgaggaccagatgaggttccgactgaacaaatagactcaaaacttccataaagtcttctaccaggaccacttcaaatccccattcagagagcattttcccaatctgttgacgaatgacctgatcatcttctattaataaaatcttgtgcatgcgcttctccttttccattattataacagatttttccatgctagatggtctgaaactgaatttgaaatagcctgtttttagccagtacaaacaggctatgctactagctaatttgagggaaatttgctaagataaataaaaagaaaggagctcttatggccaatatttttgactatctgaaagatgtcgcatatgattcttattacgaccttcccttgaatgagttagacattctaaccttaatagaaatcacctacctctcctttgataatctggtctccacacttcctcaacgtcttttagatctagcacctcaggttccaagagatcccaccatgcttactagcaaaaatcgccttcaattattagatgaattggctcaacacaagcgcttcaaaaattgcaaactctcccattttatcaacgacatcgaccctgaactgcaaaagcaatttgcggctatgacttatcgtgtcagcctcgatacctatctgattgtctttcgtgggacagatgacagtatcattggctggaaggaagatttccacctgacctatatgaaggaaattcctgctcaaaagcacgcccttcgctatttaaagaacttttttgcccatcatcctaagcaaaaggttattctagctgggcattccaagggaggaaatctcgctatctatgctgctagccaaattgagcaaagtttgcaaaatcagatcacagcagtttatacatttgatgcacctggtctccatcaagaattgacacagactgcgggttatcaaaggataatggatagaagcaagatattcattccacaaggttccattatcggtatgatgctggaaattcctgctcaccaaatcatcgttcagagtactgccctgggtggcatcgcccagcacgatacctttagttggcagattgaggacaagcacttcgtccaactggataagaccaacagtgatagccagcaagtagacacaacctttaaagaatgggtggccacagtccctgacgaagaacttcagctctacttcgacctcttctttggcactattcttgatgctggtattagctctatcaatgacttggcttccttaaaggcgcttgaatacattcatcatctctttgtccaagctcaatccctcactccagaagaaagagaaaccttgggtcgccttacccagttattgattgatactcgttaccaggcatggaaaaatagataatactcttgaaaattaaatgtatacaaaacaaaagacctagaatacatactttcatgtgcattctaagtctttttaaatagaatctaatagtcaataaaaatcaaagagcattgagagataatggggcttggaacgtccctctcgcttcaacaaaatgaccccattatagattaaaaagatgccacttagaaaaagcaaaaaaggaagtaagacaaaggcaaatatataaaaagctaactgaacattctcgtatccatttttataaaaaaggtaggatagataaaaataacttgaaatgagggataataaaaataatactggattccacaaacttctattatccttccaaaatgacactataaaggctaatacaattcctataacgagatacatttcttactcctttaatagctacattttatcataattatccaaagaaaaaagagggcatttatccctcttaatccttcatctgactctctgcatcggccacgactttttctagactggtttgaccaagttctgcctccatagtcaactgaattctctccaatttttgatccaaaacatcatgaatatgagctcctacagggcaatttggattcggattgtcatggaaactgaagagttgacctgtcttaccaagacattcgaccgcctgataaacatctaaaagactaatatccttaaggtccttgacaatctctgttccgcccgttccacgcgctactgaaatcagctctgccttcttcaactgggacaagatctttctgataatgacaggattgaccccgacactagcagccagaaaatcactggtcaccttgctttccttcccctcgagggcaatgattatcagcatatgagtcgcaatggtaaatctacttggaatttgcatcctcttctcctttttacgaggctaccctgcctctactcttctttttctattattataccctttttagttgtaatgtcaatcgttaccacttttcaaccagtcgtctaactcccgatcgcagccctctttctgagccaattctctcaaaaattcctgatgatgagtatggtggatcccattgaccagactttcatagtaaacctcaaaatagggaagtctcaggtctttagccagctgcaattcagctgctacatcgtagtctacccgtcggaagtccatatctaccaggcctttgtcatcaaactccaaaatcatatactgggcccgcaagtccttccgtagctgagcgtccaaaaagaaaggttggccaatcgaacccggattgacaatcaattgcccaccagtcccgtaacgaagcaactgctggtgaatatgtccataaacagcaatatcacagggaggatgagtcaccaagcggtcaaactcctcttgtttgccagtatgaatcaactctcgcccccagttcttatcaggcagatgatggctaattcccaccgtcaaatccccaaactgacgatgaatttgaagaggttgattgtggagcacttcaatttcttctagggaaatttcctctaaaacatactggcactggcgcaagagatagcgttgactggggcgagtactgtccaattccttacggacaccatgccaaagactgtcttcccagtttcccaaaactctagccgtaatcggtagttgatccaacaagtccaaaatccttctacgccctgtccctggcatgagaatatctcccaaaagccagtattcatccactcctatctgccgagcatctgccaaaacagcctccaaggcggtggtatttccatgaatatctgaaagaagagctattttcgtcatatccatctcctcgttttttctcttgcaataagtataacataaaaagtcacagctagagaaatctagctttttttgatatactagataaagatattagacaagaggaaacgaatgaccccaaacaaagaagactatctaaaatgtatttatgaaattggcatagacctgcataagattaccaacaaggaaattgcggctcgcatgcaagtctctccccctgccgtaactgaaatgatcaaacgaatgaaaagtgaaaatctcatcctaaaggacaaggaatgtggctatctactgactgacctcggtctcaaactggtctctgagctctatcgtaagcaccgcttgattgaagtttttctagttcatcatttagactatacaagtgaccagattcacgaggaagctgaggtcttggaacacactgtctctgacctgttcgtggaaagactagataaactgctaggtttccctaaaacctgcccccacgggggaactattcctgccaagggagaactactcgttgaaatcaataacctcccactagctgatatcaaggaagctggcgcctaccgcctgactcgggtgcacgatagttttgacattctccattatctggacaagcactcacttcacatcggtgaccagctccaagtcaagcagtttgatggcttcagcaataccttcactatcctcagtaacgacgaggatttacaagtgaatatggacattgcaaaacaactctatgtcgagaaaatcaactaatttctcaagtcccctaccaaccctgaaagttttattttggctctttgtcaactgtagtgggttgaagtcagctaagctcgagaaaggacaaattttgtcctttcttttttgatattcagagcgataaaaatccgttttttgaagttttcaaagttccgaaaaccaaaggcattgcgcttgataagtttgatgagattattggtcgcttccagtttggcattagaatagtgtagttgaagggcgttgacaatcttttctttatctttgaggaaggttttaaagacagtctgaaaaataggatgaacctgctttagattgtcctcaatgagtccgaaaaatttctccggtttcttattctgaaagtgaaacagcaagagttgatagagctgatagtggtgtttcaagtcttgtgaatagctcaaaagcttgtctaaaatctctttattggttaagtgcatacgaaaagtaggacgataaaatcgcttatcactcagtttacggctatcctgttgtatgagcttccagtagcgcttgatagccttgtattcatgggattttcgatgaaactgattcatgatttgaacacgcacacgactcatagcacggctaagatgttgtacaatgtgaaagcgatccaacacgattttagcacacgggaaaagttgtctagctaaatcatagtaaggactaaacatatccatagtaatgattttgacgcgacatcggacggctctatcatatttaagaaagtgatttcggatgacagcttgtgttcttcccttaagaacagtgatgatattgagattgttgatgatattgagattgttaaaatcttgcgcaatgaagctcatctttccttttgtaaaagcatactcatcccaagacataatctcaggaagacaagaaaaatcatgtttaaagtgaaagtcattgagcttacgaataacagttgaagttgagatggaaagctgatgggcaatatcagtcatagaaatcttttcaattaacttttgagcaatcttttggttgatgatacgagggatttggtgattcttcttgacgatagaagtttcagcgaccatcatttttgaacagtgatagcacttgaatcgacgctttctaaggagaattctagtaggcataccagtcgtttcaagataaggaattttagaaggtttttgaaagtcatatttcttcaattggtttccgcactcagggcaagatggggcgtcgtagtccagtttggcgatgatttccttgtgtgtatccttattgatgatgtctaaaatctggatgttagggtctttaatgtctagtaattttgtgataaaatgtaattgttccatatgaatctttctaatgagttgttttgtcgcttttcattataggtcatatgggactttttttctacaataaaataggctccataatatctatagtggatttacccactacaaatattatagaacctttattttcagggttttatttctatcattttattttactttcatttggtgggagaatatttgaaaaaaagaaaggtagtttaacctatgaaaaaatcactaaaaatttttgctacatctaaatagtttgacctcttcggggttgctttggtcgttgggattgcgattgcatctggttacctcaactcacacctcgataaatttgtagactggggatcatggacagctcttgtaccctttggattgatttccgtaaccaacgttgggatttccatgttgtccactcgtttcacggggaaattaagcaaatggggaaattactttggtattgttaataccattttgtccggtgctattgattatatccttggaaataaggcggccatcattacctatcccgtcaccttcctcatttatacctttgctataaagaagtgggaagcttcgcaagaaggcagacccaaccaaatgagccaaaaacaggtaaaattggcggccatcatcatttccatcatcgccttcctctttgcctttgtgaccaactatatcggatatgggggcaagatgaatctccttgcctacgtaacaactattgcctttgcactgtccctcattgccaatgctttgaatgcattaaaactaacaactcagtggggcttttggttgatttacaatttcgttcagctgacaaaagctggtattcaaggaaacttcgccaatatcggtaaatacatcttttatatcctcaatgcaatcggagctttatttgtctggaatgatgaagaagttagataatagaaggaaactcaaataaagaatactagccaacttaagagaatctcccttctgctatttttatcattttagttgtaactcccattcttttggagtagaatgaagttagataaaagagggaggtcttgtcatgaaaaaactctatagaatccattttatagcaattgcagttattgatttgctactatttgcattttttatcactagactcgagacatcttttgagtggctcttgctctctggtttaattttcttccttgctcaaggactcctgctatttctcttggtcgtccgactcaaacatcaattcgctgagatttatcctcaaatcaataaaaagattcgcttctactatttaggggttctcaccattgattttctattttttgttctcttagccttcattagttctcagcgtttttcatctcttatgccaatcatcactgcttgccattctactttttattatatgacagctgactacctaagagaaaactatccagacttttacgacaaacacatctctttatgggagtgtctctaaagaaaaggaggttttagcatgaaaaaaatcatcttcatcaaaaccattcaactccttgtcattgatggaatcatgctggcatttttgacatttaaaagggggcttacttgggactggattttgatttatagcggttggctcattttctttcatcctgtgctattgacctatctttcaaaccaactttgtgaccactttagttaactctattcccagattagaccgagattctggcgttttgctttacaaattctcctatgggatagcctgatgattctctccttggtgtctttaagtgatattccacttttccttcagggaactctcctcatcctaggacatctcatcccttcctatcgcatctgccaaagcctgaaaagagacttcccccaagcatatcaagaaccgatttctttttggagtattttatgatagatgagaaagaccaagccgactgggcttggtctttcttatctctttttagtatctaggataatggtaacaggtccattattaaccagctcaacctgcatatctgctccaaagatgcctgtctgaacgggcacttcttgcgctaatttttgattgaaagcatcatagaagtctgatgccatatcaggtttagctgcccctgtaaaggctggacgattgcctctcttagtatccgcaaagagggtaaactgagaaatagagaggatttctccttcaatatctttgacagacaggttcatcttgccttctgcgtctgaaaaaatccgcatattgaccagttttctcacagcatagtccaaatcttcctcttggtcctctggtccaacaccaaccagcaataaaagtccctgattgatttttccctgaatctggccttctatactcacttgggcttttttaacccgttggataatgattttcataatagcctttctagtaagagctaggacaactagccgttggtccgtttgacagagtaaacttctggcacactcttaattttatcgacaaccgtggtcagtgtagagaggttggcaataccgaaggacacatggatattagcaaacttcatatccttggttggttgggcattgaccgttgaaatattcttggttgtatttgaaagaacttgcagtacatcgttcaacagtcctgtacggttgagaccgtagatatcgatatgggccatatactccttatttgagctagggtactggtcttcccattccacatcaaggagacgttgctcgtagttttcttgggcacgcaggttcatacagtccacacggtgaatagccacaccacgacccttggtaatgtagccaacaatatcgtcaccaggcacggggttacaacacttagcaatccgcactaggagaccagaagcaccttcaataaccactcccccctcatgcttgaccttgagggtttctttattttcaaccttgacctcgccacctttgacaagctcctctgcctcagctttggccttggcacgctcttcctcacggcgttccttttcagtcagacggttaaagacggtaatcgcaccgatttccccaaaaccaatggccgcaaagagggagtcttctgtcttgtaactggtcttttgcagaacttgatccatgtggcgcttgtccataaatttatttgccacatagccattttcttggaactgagccatcagcatctcacgacccttgttgacagacaattccttatcttggtttttaaagaactggcgaatcttattgcgcgccttgctagtcttgaccatattgagccagtcacggctaggtccaaaggagttcgggttggcgataatttcaacctgatcccctgtctttaacttggttgtcagtggaaccatgcggccattgaccttggcaccagttgctttttcaccgaccttggtatggatttcgtaggcaaaatcaatcggtcctgaatctttgggaagggaacggacagctccatctggggtaaaaacgtaaatctcctcagccaaatagttttccttaacagagtccacaaattccttagcatcatcagcctggtcttggagctccatcatctccttgatccagttcattccaatagctgattccttgctgttaacttgcccctttatacctttcttataagcccagtgagccgcaaccccgtactcagccacctcgtgcatttccttggttcgaatctggaattcaatcggcccttttggtccataaacagtcgtatggatagactgataaccattggccttgcggttggcgatatagtctttgaagcgacctggcatcggtttccaaaattcatgcacgtaaccaagcatggcataaacatcactttgggtatctaaaatacaacgaatagcaatcagatcatagatttcctcaaaccgttttctcttgtcctgcattttgcggaaaattgagtaaatatgcttgggacgaccataaatcttccctttcaagtgacgttctgtcgtatactcctctaattttgtgactacctcatccaccaaggcctcacgctccctgcgcttttccttcatcatatgggtaatcttgtaaaactccgttggattgagataacggaaagacaagtcttctaattcccatttgacactggaaatccccaaacgatgggcaagcggggcatagatttccatggtttctttggaaatacgctcctgcttgtcttttcgaagatgtttcagggtccgcatattgtgcaagcggtcagacagtttgaccaaaataacgcggatgtcctcagacatggccatgagcatcttgcgatgattttccgctaattgctcctcgatcgatttgtactcgaccttgccaagcttggtaactccgtcaacaatcatccgcacatcaggaccaaactctctttccaaatcgtccaaagtcgcatctgtatcttccaccacatcatgcaagaatccacaagctactgttacagcatccagctttagcttagctaaaatacctgccacttggatagggtgaatgatataaggctcgcctgatttgcgatattgaccactgtggcattcaacagcatagaccaaggccttatggacaaaatgaacatcctcttccgttaaatattctttggttaaagcgacaacttcttcgcctgttaaattcacttctttcggcatctctactctccaattcttcctaccattttatcacttttttaagaatatgaaaactagattggaacagaataagaaaaaaataattcaaaattgcttgataattctgaattattggtccgtaatatactacgaagttagattttaaacttaggtgatagaaggagagatagaagaacggaaaccatattgtaacccaaagactttctgacttccccaattccattgaagatacgaaagataaacggtggaactcgtatcacatacactggtaccttgactggattttggaattaatactaaatgaaaatcaaagagcaaactaggaaactagccgcaggttactcaaagcaccgctttgaggttgcagataaagttgacgcggtttgaagagatttttgaagagtataaaaatcctcaagatactttcttctatcctttagtttataaggagaatacctatgaaaaaaactgctatttctatctttgctctcctaatgttaggagtttgctgcctgttcctattcagccagcaaagctataaaaaacagtcgttcaatactatgctaacgaccagaacctgcccagtaggataacttatagtgaatatagcgacaaatgagaagccaactacggtagcactctaaacatcacgtctatcaaacaagctaatgacggagtttatgcaacctatgaagggcaattgacacctttccaatattgataaattgataaccagcctgtcttcatctagtcatgctggtttttaagttcattttaaatccttacctattctccctaactgtgctatacttaatttatactcaatgaaaatcaaagagcaaactagaaagctagccgcaggctgttcaaagcactgctttgaggttgcagataaagttgacgcggtttgaagagattttcgaagagtattagtacattctttgagattggagctagtatgaaaatccataaaaccgtgaatcctgttgcctatgaaaatacctattatctagaaggcgaaaagcacctcatcgtcgtcgatcctggtagtcattgggaagccattcgtcagacaatcgagaagatcaacaaaccgatctgtgctattctcttgacccacgcccattatgaccatatcatgagtctggacttggttcgcgagacgtttggcaatcctcctgtctatatcgcagagagcgaagccagctggctctacactcctgtcgataatctctccggtctccctcgccacgatgatatggcagatgtggtcacaaaacctgcagaacacacctttgtctttcacgaagaataccaactagaggaatttcgttttaaggttctaccgaccccagggcactctatcggtggtgtttccctagtctttcctgatgctcatctagtcttgacgggagatgctctattccgcgaaactatcggacggaccgaccttccgactggtagcatggagcaactccttcatagtatccagacccaactcttcaccctaccaaactacgatgtctatccaggacatggtccagctactactatcgctcacgaaaaggccttcaatccctttttctagcaagatgatgacaatcgaaatttaagtaaactatccagcaaatctttctattacaaaaggcatcctatcaaggttttcacacatgattggatgccttttttctgatgactagattttttgcattaccaaataatcacgcgctcctctggtgaacgccacattccgtctccttctttgacatcataggttgtaaagaaatcgtcgaagtttggtacttgcacattgacacggagtttggctggtgcgtgcacatcgacgctagccaaaagtttcataaattctggtcgacctttcatgcgccagatgcgaccgaagttgtagaagaactcttctgctgagaagtctgcttctctcttagctgcttcaagcgctgctgcgattcctcccaagtcagccacgttttctgatacagtcaatttaccgttaatggttgctccataagaatcctgtccatcaaattggtcaatgactttttgtgttttctccttgaaggcagcatagtcgctctctgtccaccaatccttgaggctaccattttcgtcaaaggaagccccgttagtatcaaaggcgtgggaaatttcatgggcaatcactgccccaataccaccgtagttagcagaagatgactgatgcaagtcatagaaaggcgcctgtaaaatggccgctggaaagacaatcaggttcttctgaggattgtagtaggcattgaccatatgagcaggcatgccccattccttataatctacaggctggttccacttactccaactgtgcttgatttccacacgcgcaaaggctagagcattctcaaaaagactggcagtttcattcactaccttatccttgtaacgtgcaggcaattcttctggatagccaatataaggtttgatcacattgagcttcacgatagcctgtttacaggtttctggagtgagccagtcattcttaagcagacgctccttataaacatcaatcatggttgccacttttttctccacatccgccttggcttctggagagaacttctcacgggcgtaccaaagacccagggcttgcttgaaaggttcttgtgctagatgataagctgctttgaccttatcttttgcctctggaactccagaaagggcacggctgtaggcaccagacaaaacacggatatcctctgttaaatagctggttgaaagattgacaacactcaaaatcaaggttgctttaaggagagaccaggcttcctcactgtagaattgctctgctgcttgccagaaacgttcctcgtctacaataaccttgtctggtaattgcccaataactgctttgaagaagtcatccaaaggtagggcaggcgcgaatttcttgaaatcttcgtaagaatatggatgatagagtttagcatattctgaactttcttcattagagagcaccactgccgcaactcggcggtccaattcaagtcttttttctagcaagtcttcaatttcttcatcagagaaatcataagccttgaggagatttgcgctgctttctttccaaagagtcaagagctcttcgcgctgaggatgttcttctgcatagtaggtcgtatctggcaagattgtgcttggagcgctagcccatagaacattgattctagcatccataaagtctggcgatacaccaaaaggaaggaagtttggttttcctgcaagctcaaactctgctagtttagctgtaaaatccgcaaaagtctccaattcttggaattctttaaggagtggtaagacaggtgtgataccgtcagcttctctcttgtcaaaatcacgaactaggcggtggtatttgacaaagttttccaagatagcatcctcaggcacttcttcacctgctaaccacttgtctgttgtcgccagcatcaggtcttcaatttcctggtctaaatcaacaaaacctcctgtttgagacttatctgctgggatttcagctgtctgttgccattctccattgatagcatcataaaaatcatcttgataacgtgtcatcttgttctcgctttcatttgtatttgcatttatcttaacaaaaatcactagggaatgcaattaataaccatttaactattattttttagctattataaaaaatctttccatgataaaacgcataattccaagttttttacacttgatactatgcgttttataatttagaaatttatcctgaaagttatctttagaatctatttttcagttattattttaattttttcaaaaattaacttgacttaattttttttttaatgtatattaagagacaggaggaatacaagtttatgatacgtatcgaaaacctcagtgtctcctacaaagaaacgttggcacttaaggatatttcactagtgctccatggaccaacaattaccggcatcattggtccaaacggcgctgggaaatcaacactattaaaaggtatgttgggaattatcccacatcaaggtcaggcatttctcgatgacaaggaagttaaaaaatccttacaccgaattgcctatgtcgaacaaaaaatcaatatcgactacaactttcccatcaaggtcaaggaatgcgtctcgttaggactatttccctctattcctctctttcgaagtttaaaggctaaacattggaagaaagtgcaagaggcccttgaaatcgtcggcctagctgactacgctgaacgtcaaattagtcaactgtctggaggtcaattccagcgggtcttgattgccagatgtttggtgcaggaagccgactatatcctcttggatgaaccctttgctgggattgactctgtcagtgaggaaatcatcatgaatacgctgagagatttgaaaaaagctgggaagacggttctcatcgttcaccacgacctcagcaagattccccactacttcgatcaagtcttacttgtcaatcgagaagtgattgcctttggtccaacaaaagaaacttttaccgaaaccaatctaaaagaagcttacggtaatcaactctttttcaatggaggtgacctatgattgcagaatttatcgatggattgcaaaaattccatttcctacaaaatgccttgataacagctattgtcgtcgggattgtagctggagctgtgggatgtttcattattctacgcgggatgtcactcatgggagatgccatttcacatgctgtcttaccaggtgtagccctatccttcatcttgggccttgacttctttatcggagccattgtctttggattgctagctgccatcatcattacctacatcaaaggaaactcgattatcaaaagcgataccgccatcggcattaccttttcttctttcttagccctcggtatcatcttgattggtgtcgctaaaagttcaactgaccttttccatatcctttttggtaatatcctggccgtccaagatacggatatgtttattactatgggtgtgggggcagctatcctcttgttaatctggattttcttcaagcaactcttgataacttcctttgatgaactcttggctaaagccatgggaatgcctgtcaatttctatcactaccttctcatggtactcctgactctcgtgtctgtgacagccatgcaaagtgtcggaactatcctgattgtagccatgctgattaccccagctgcaactgcttatctgtatgctaatagtctgaaaagtatgattttcctttcctcaaccttcggagctactgcttcagttttgggactctttattggctatagttttaatgttgcggcaggttctagtatcgtgcttacagctgctagtttctttctcattagcttctttatcgctcccaaacaacgatatttgaaactgaaaaataaacatttgttaaaataaggggcaaagccctaataaattggaggatctaatgaaaaaattaggtacattactcgttctctttctttctgcaatcattcttgtagcatgtgctagcggaaaaaaagatacaacttctggtcaaaaactaaaagttgttgctacaaactcaatcatcgctgatattactaaaaatattgctggtgacaaaattgaccttcatagtatcgttccgattgggcaagacccacacgaatacgaaccacttcctgaagacgttaagaaaacttctgaggctaatttgattttctataacggtatcaaccttgaaacaggtggcaatgcttggtttacaaaattggtagaaaatgccaagaaaactgaaaacaaagactacttcgcagtcagcgacggcgttgatgttatctaccttgaaggtcaaaatgaaaaaggaaaagaagacccacacgcttggcttaaccttgaaaacggtattatttttgctaaaaatatcgccaaacaattgagcgccaaagaccctaacaataaagaattctatgaaaaaaatctcaaagaatatactgataagttagacaaacttgataaagaaagtaaggataaatttaataagatccctgctgaaaagaaactcattgtaaccagcgaaggagcattcaaatacttctctaaagcctatggtgtcccaagtgcttacatctgggaaatcaatactgaagaagaaggaactcctgaacaaatcaagaccttggttgaaaaacttcgccaaacaaaagttccatcactctttgtagaatcaagtgtggatgaccgtccaatgaaaactgtttctcaagacacaaacatcccaatctacgctcaaatctttactgactctatcgcagaacaaggtaaagaaggcgacagctactacagcatgatgaaatacaaccttgacaagattgctgaaggattggcaaaataaacctatgaaaaacgtcattctcacatgagctggcgttttttctatgcccatatttccggtcaaatcattggaaaattccgactgtttcagctaaaatggaagaaaaaagattggagtatcctatggtaacttttctcggaaatcctgtgagctttacaggtaaacaactacaagtcggcgacaaggcgcttgatttttctcttactacaacagatctttctaaaaaatctctggctgattttgatggcaagaaaaaagtcttgagtgtcgttccttctatcgatacaggcatctgctcaactcaaacacgtcgttttaatgaagaattggctggactggacaacacggtcgtattgactgtttcaatggacctaccttttgctcaaaaacgttggtgcggtgctgaaggccttgacaatgccattatgctttcagactactttgaccattctttcgggcgcgattatgccctcttgatcaacgaatggcacctattagcacgcgcagtctttgtcctcgatactgacaatacgattcgctacgttgaatacgtggataatatcaattctgagccaaacttcgaagccgcaattgcagctgctaaagccctatagaaaaaatcctctgtcacaaagagttccctgctctttgaaacggaggatttttgaatattagtaaatagaagttcaatcagctaaaaataactaccttactctacagatttcagggcttctaacatatcaacctttctcagataataattgacgaagaaaccaagcaaggtcaaaatgatgcttactgctgccactgggattacatagacttcccagcctacctgcggataaaagagaatagtcgcaggcgaaatcatttgaatcaaaaattggtgtaaatagaaaccagctatcagaccaagtacgattcccacaagggacagcacaatcgtctcacggtaaatgtagagggtgacttcattattatgaaaaccaagaaccttgatagtggagagttcacggattctctcagctacgttgatattggtcagattgtaaaggatgacaatagctaatagaaccgatacgatgaccaagatggtcatggtctgattgagtgagctagcgatagagtcgaagagtcgaatggctgaagcattttggacaacgctggacaccgcagattgattcataagcaagcccgcctgactttcgatactagttgcactggtatcccttaatgagaccagataagtgttggcttggggtagctgtccgtaaagttgctcatagctagcctgactcatataaataaagtgaccaacgtagttctcagtaatagcaacgacctttagttccttaccttcaatttctaaagtctgcccaaccttgacacctgccagctgggcgagtttagctgtaataacgatgccatcttttaatgtcagctcctgctgatgatgttgaagatggataaagggagtcaaatcttccttctctatcatcataagagtaatgttttgaagaccagctttgcctttgaaatccttgtatagcgctttagaatagattttctggtaggctagtatctcctgccctttcaacacttctgctagctctaccttgtcctgattggtcgcactaggattttcagagacaagcatctgatactgttggatttgttgaaactgtttagacggaactcctgctacagaagattggattcccaaacctgcaaagagcagagctacagaacctgccacaccaaagattgtcatcaacattctctgcttataacgaaagatgttgcgggctgttaccttatgagtaaaactgagacgacgccagataaaaccgatacgctccaataagattttagctcctttgacaggaggtttaggaagtagaagctgggctgcttcgtcatgaagttccctccaagccaccagataggctggtaacacactcgccaacaagctcaagacaaaagctagtaagctataggtccaatagaactgaatctgagtttctcccaccaccatgccttttgtaatgacacttgaaattacactggctagcaaataatgaccaagtatactacctagagccgttccgacagtcccagctactagtccataaaggagaaacttggcgataatatccttactacgataacccaaggccttaaaaatccctgcatgagttcgctcttcgtctacaaagcgagtcatggtcgtaaaggtcaccatggctgctacggcataaagtaccacaggaaagatattgcccactgctcgaatactggatgaagcattgctatacataagatagccctgaccacctggcatggtctgacgattataaacctgataccttggctccgccaaatcatccaagacttgctgatgtttttctaatttttccttttcttgggctagattttgttcagcttgctttagtttgtcctcttccttgcccaattcctgcttggcttgggtaagttgagcactagcctgctctctctgaacttgaggaaacaaggctagttgactttcttgagcctgtatacgagcttgagcagctgctaaacgacgcttgccttcctgcaaattagtctgagccttgtcaagggtctcttgccccttgtctagagactcttgtccttcttttttcaaaagttgcagacgtaccttgccattatctgataaaatttgttcaagctcttcttgatgttgcttggatttttcttcataagctgatgaaaaggcatttaaacccgctaaatcttgatatttcaaacgagctatattgtagactttctgatcaaattgactaggtaaaatcaccccataggctgtcagagtcccacttccacttcctgcgtagcccatatctcgctgggagaggatttcagccgaatccacaaaaccagtaatggtataagtatggtcttttaaagaggaatgaccctcttctttttctttaaaactaatctcctgtcccacgctgtattggccttgcaaatgagtggccaaagcgatttccttgtctgactgaggaagtcgtccctttcttagctgaaaggttgaaattcgctctggtttggagtacagccgaatggcatcctgcccattatccatagtcacatctgtcaaatagccaaactcgacctctgcgccctccgtctgttttagttcttcttggtctgcttgatccaagccatagttagacatgactgccaaatccaaggtttgagcagttgttaaataagcattagctgtcgcctccatgttgggactggttactttgaggcctactaaggctagagatcccaacatcatcaggatcaagatggataaaaaacgccccttggagcctgtgaaggactgaactaagtccttccaataagtttttcgcttgatcatgctagtactccaaactgtcaatatcctgaggatgctggttgagcaccacatccttgacactggcatcgtgcatttgaatcacgcgatcagcaatgggcgccaaagctccattatgagtcacgatgatcaccgtcgctcccttttgacgagacatgtcttggagaattttcaaaacctgcttgcccgtctgataatccaaggctccagtcggttcatcacaaaggagaattttaggatttttggctaccgcgcgtgcaatggagactcgctgttgctcccctccagaaagctgggctggaaagttattgagacgatgagccagacctacatctgtcaaggcctgatcaggattcaaggcatctgtcacaatttcagaagccagttccacattttccttagctgtcagattagaaactagattataaaactgaaaaacaaaccccacatcatttctacggtaattggtgcgctggtgggaactataatccgcaatattaacaccatcaatccagatttccccttcatcattggtatccattcccccaagaaggttaagaactgttgacttgcctgcacctgaagcaccaaggataataaccagctcccccttttcaatctcaaaattcacatcacaattggccacaatctccgtgtccccaacctgataacgcttgtaacagtgtttcatctcaatataagccatcagacccaccctctatcaaacaaattatactcctcgaaaatctctcttcaaaccacgtcagcttccatctgcaacctcaaaacactgttttgagcaacctgcggctagcttcctagtttgtgctctttgattttcattgagtattacttcctattatcattataacgttttttcaactagttgaaaactgcttatattcttaaatccttattaaaaggcagtttcaaattactgccttataacatcttcttaaaaataaaattgaacaagatcaccttctgctgttgccaccgaaatacaatctttccccatgcatttcgcttttattttttcttgattcattttaatcacactcttctcaatatctggataagaaactcgcaaatctcctccactccttgataaaatggtcaactgtaagagttttttatcttcccagctcatgctcacttcaaaatgtccacgtgccattaagcctgaaacagaacctgttgaccaagcatcaggtagggcagctagaggtaccagataagctgcatgagactggagtaacatttctgccatgccactagtagcaccaaaattaccatctatctgaaaaggaggatggctacaccaaagattttgcaaggtggatgtctttaactgctctgccaataatttatgggctcgattgccatctcccaaacgcgcccagagattgatcttattagccttggaccagcctgtgccgccatctccacgatcattgaggctagcacgcgccgcttcaatatactcttgtcccttgtagctaaagagattgccaggatagagtcccactagatgggaagcgtgccgatgctgggcctccactttctcattttgaaaatactgctcttcctcctcataccactccctgattcgaccagattgagtgatttgcaaaggatttagtaaatcagacttctccttaacctcagtcaacaagtcctcatccagtcccaattcctgagcagcctgaataaaatcatgaaataactgccaaatcagagattggtcataggtattgccaatcgaaatcggcccatgttctggggaataagacggagaagacacccaacgctgcgcctgctgatccttatgtaaaaaggcattccaaaaacgaaccgtttccctcaacatgggataaattttctccctgagatagtcttggtccctataaaataaataggcttcataaacggtttgcatcatccacgcattggcagctggtgaccaaccccaatagtaatcccaaccaggtgccgtccaaccaaagggagtcgcttgagtatgaaccaaccaaccattctcctcacctttctgagagacgattcctgcatactttacagccgctagacgaccatagacacgcaaatcatctacatagttgatgactggaaagaccgtctctaggagattggtaacataggctggccaataattcagctgcagattgacatttaagtgatagtccgaattccaaggaggattgtcgaccgcattccagactccctgtaggttagctggtagagcatctgggcagtctctggacgaactaatcaataaataccgtccatactggaagaacagctcctccaaagcctgcccttcttgtggcttataattttttaacaaatcatctgtagtggatgcgtcaacatcagcttccaaatccaattgaacacgctggaataaggcttggtagtcctcgatatgccttgatttcaattgggtatagcccttttctttagctgtgtccaccaagtctatcacctgttgctctaaatctagtttcttgcgataattgctagcaggattttgggcaaaatccgtcttagcggccaagaagagattggcataactggctcctgatatctgaaccctatctgaccaaactctaatatctccatccgtttcccaagctagataactagcaaaccgcagatcattatccttaactcttcccttcatcaagatatgagaatcagtaatatccaacttacactccttgtaatcagatttttcctgctcatactttccatcagaagccaaatcacaggtcaaggatagttctatagtaaaatctagagtttccaacccttccttagtaaaacattgaaccaagagatcatctggaaaactcgcaaaagctttacgttcaaatcgcgttcccttatagacataagaagtcgtcgcaagtgccttactaatattcagctgtctctgatagtccgtcacctgagacaaagtcgtaccttgctggctgaactcaatgtgaatatccccaaaagacagataggtcccatattgactcgtttttggcccaattaggtgctgctcagccagttccttagccagattgtaatctctcttctccaaagcctgccgaatctcagctaaaaaaacatactgatcctgaagatttccaccctgataatctgaactatcaggaagtggacctccagaccagagacttttttcattaaattgaatccgttcagcccctataaggccaaatacttttgctcctaaagaaccattgcctatcggtaaagcttcttcttcccaacccatgtaagtggttgaagctggttgcttgtaggccagtacataatcttgttttttattccttatcatacttccatactaacataaaaagcctagaaatcaattctagacttacaattttttattttccaaggtagtattcagaaacgacgttcaatttttcgtcgaattcgaataccaatggtgggaagttagggatttccacgtccatgatctcgtcatctgacaaacctttgatgtgttttacaagggcacggattgagttaccgtgagctcctacgaatacgtttttaccatctttaagagctggagcgattttatcttcccagaatggaagagcacgttccaaagtcactttcaagttttcagcatctgggataactgagtcgtcaagtgaagcgtaacgacggtctgtgtgagctgagtgctcatcatcacggtccatgtttggaggcaatacatcgtatgaacgacgccagatgtgaacttgctcatcaccaaattgttcagcagcttcagctttgtttttaccagtcaaaccaccgtagtgacgttcgttcaagcgccatgatttttcaactggaacccacaattggtcagaagcttcaagagccaagttagttgttttgatagcacgtttcaatactgaagtgtaagcttggtcaaattcgataccagcttctttgatcaatttaccagcgtcaatcgcttgttgtgtacctttttcagacaaatcaacatcagcccaaccagtgaaaaggttagctttgttccattcagactcaccgtggcgagcaaaaaccaattttaccattagatggattctcctttaaattttccgaggtttcccctcgtttatctattctattttacacaatttttcacaaaaaagctagtcaaaaccaaaaaggaaaggactgtttgacaatgtttggcaatcacattgtttttggttgtttctattctatcttcattatttaacctttttttctgcgcatcgaataatttttgagttgactcttttagtttagtaaacgagtcattattttccatagctatgcctttgaaaccttcctcagctttagtaaaataatcatcaaaaatatttttataaagatctatataatctgcataagtgcgtattgattcaatcgcatcgtctgttacaaccggtgtatcgaaagtgattgtttcttttgaactattggatgttgctactgtcttctcatcattacttgttgaagtattctttgaactttatgttccacatgcaactagaagagaaagagataatagagctactcctataccgataaacttttttgttcttttcatgctaaaataccttttattcttctgatttgaatttcttcaatgttgaaaggaatagagatcctccgataatagcaaaaatccccccaacccatcctaagaacggaatagaatgagactaactccaccagaaacaatcattagtacagacggagctgcacctacacgcttatctcctttatagtaaacaatagcaatgataccaagaacaagatttgcaatcttcaaggcattcaagagtaaggctacacctgaaaaagcccctgcagtagctcctccattaagagttgtagcagctgtgtttaccgctattcccaacaagacaaaaggaccaataagaagtaaaattcctcccacaagaccgacgataccactaattaaagcaagtctttttaattttataataaaatctccttttttatttttttcaaataaaattgtatcatatttgcttttaaaaaaagtatgttctgatattataaaataaaaatttgtataatatgaaataaaatataatacttttcagaaaccagaaataactatataaatttattgttgtaaaaatattacactatttaccaatcttatccctaatatcaaattcctattttatcttactactgttagcttgctaagtttctctttgattcttgttgagtataaaaagtcatacctcgcaaatttttaaaataaataaaaaacgcatcatatcaggtattcaaaaacgtgatacaatgcgtttaatagactataaaattagttgtcttttcttctcaaattgaattttgcctagacttttcaatcttatttctcttcaaatccttctgcgactgcttccgcaaagttttcttctacgatgcttgcacagtggtcacagataactgcctggtagctgcgttctgctgttgttgggtcgatacgacggcaacggtcacatacttcaccagtagcacgttcaactgtgaaggctacatcttcgaagctaagggcagcttccggagctggtccttctgcgatggtcaactcagacacgatcaaaagttgtgctacattgctgtttactgcttcgagtagagttttcacaacttcatttggataaactgtcaagtgtgcttcaagtgatttaccgataacttttgcattacgagcttcttccaaggctttttgtgcttgtccacgaaagtccatgaaggctgcccatgtatccaagatttcttcttggttagcaaaagtttgaacttctggtaattctgacaattggacgaagtcttctgtttcaaactcaagatatgaccagatttcttccgcagtgtgaggaaggattggtgtcaagagtttggtgattttgacaagaatgtcatagaagacagtctgcatttgacggcgttccagtgatttggcaccttcaatgtaaacaacatctttggcaaaatcaaggtagaaggctgacaagtcaacgttgataaagttcaccaaggccttgtagatcgtcaagaattcaaagtctgcataggcatcacgaatggtcttgacaagctggttaaagcgaatcgtcatgtacttatcaactgaacgaagctcatcgtaagcgactgtatcttgagctgggttaaagtcagatgtattggcaatcaagaaacgaagagtgttacgaatcttacggtaagtttcagaaacttggctcaagatatccatagagatacgcacgtcattgcttgagtcaacacttgttacccagagacgcaagatttcagcaccgaattgtttttcaacatcgcttggagcaatagtatttccaagagatttagacatcttctcacctttaccatcaagggcaaaaccttgtgacaagatttgtttgtaaggtgctacgccatggttggcaacagatgtgataagtgatgagttaaaccaaccacggtattggtcagaaccttctaggtaaaggtcggctgggtaagtcaattcaggacggtttaccaccactccattccatgatgaacctgagtcaaaccaaacgtccatgatatcagtttcttttttgaactcgccgtttggtgaacctggatgagtaaatccttctggcaagaggtctttggcatcacgttcccaccaaatgcttgaaccatattcttcaaaaagttgagctacgtgttcaatagtttcagctaccatgatagctgtaccatcttcagcgtagaagataggaagtggaacaccccaagcacgttgacgagagataacccagtcaccacggtcacggatcatattgtaaagacggactttaccccattctgagtggaatttcactttttcaatttcgtccaagatttcttgacggaatttagaaactgaggcaaaccattgtggaactgcacgccagatgattggtttcttagtacgccagtcaaatggatatgagtgagagatttcttcttgggcaagaaggaggttaccaagtttttcaataacagttggaactaccttttcatagaattgaccttcaaattcaggaccagcattcttcatcatgataccacgttcatcaacagtcactgcgacttcaagattattagcaataccaacattgtaatcgtcctcaccaaaaccaggggctgtatggacaatacctgtaccagagtcagtcgtaacgtggtcaccaagaattaccaactcttctacagctgtatcccatgggtgttctgttacgatgtggttgagttcttggccacggtaagtttccaaaacttgaacatcagcccagccaaatttctcagacaagctagtcaataattcagcagcaacgacaaacttacgagcttcaccagcaggttgaaccaaaacgtaatcaatatctgcaccaaccgtcaaaccacgagaagctgtgatggtaaatggagtcgttgtccagacaacgatataagtatctgtatctagaactcctttgccatcttttaccttgttggcatagtaaagggaagttgaaaccaagtcatggtattcaatctctgcttcagcaagtgctgactcagatgaccatgaccagtaaactggcttagcaccacggtagatataacccttattagccatctcaccaaatacacgaatttgagctgcttcatagtcaggagtcaaggtcacatatggattttcccagtcaccagaaacacccaaacgtttaaaatcttcacgttgtttatctacttgagaaagagcgtactcacggcaaagtttcaagtactcaaccaagtccatttctttacgtttgacaccttgttttgacaagacttgctcgattggcagaccatgagtatcccaaccaggaataaatggtgcgtaaaatcctgacatagacttagaacgaacaatgatatcttttgaaatcttgttcatagcatgtccaacgtggatatttccgttagcgtatggagggccatcatgcaaggtgaaatgaggttttccttggttcaattcttgacgacgttgataaagttttgcatcttcccattccttttgccaaactggctctttggtaggaaggcctgcacgcattgggaattcagttttcccaagattaagggtgtctttgagtttcatggtatctcctttataaataataacaaattaaaaaccacgacttccaaaaaggacgaaaatcgtggtaccacctttattcggaaaaagatttagtctttctccctcttatcccgtaacgtgggaaacgtcaaatcttactagcttcagacttgagtttttgagaggataatcttatcaatagggattacaggactcacaccatctcctgctcgctggaaatataaggataagatattgttctcagaatatttcttataaaattgtaacagattcttgcggtgcttcaaatcccggtattgaatcaacagtttctgtagctggtgttggacctatcggatgcattggagctacttctggttcttcatacattgggccaactggatgagcagaggctcttcttcaacttgaggactcactacaggagttggagcttccacttcctgtttaatctgagcttcaaattcagacaattctttatcggctacctcaatacgagcttgtaattctgccatttctgcttgagagaactgacgtgtcatatcaattggttcttcttcaattggagctggaatcggttctccaagtacttcgctaaccacttctttaaaggcttcatcactggtttgaagataagtagctgttggacggagaatatcttcccaatctgaagattcaacaatagccaactgactctcaattgtagatttgagacgttggtggaagacacggctcttgttcttcaattcttctgtttcaacagcgactttcttagcattatcagttgcttgacgaagaatctcgtttgccttatatttagcttcttccaacaagcgttgcgcatcttgctctgcttgatgaatgatattgtttgaacgttcatgcgccgcctgtttcactctctcagctgtatcctgagcaatcaatacagactggctcaatgaatcttttatttcatcaaagtaagacaaacgctcttctaaactcttaatacgcaaatttttatcatgattcgcacgcacaagatcttcgtaatcacgaaccacaatatctaaaaattcatcgacttcttctggatcaaaacctctgaatcgagttccaaaagtcttgtcctttatttctaatgatgtaattggcattctattcctcacttacttaataataactggacggttatttttttcttctcttttttcgtttgtcccttatcttgaagtaatctcaagcgaccaaattttctcacactaatcaagtctccaacttgaacagtgtaatctgatttgtctaccacatgataatttacttggacaagtttcttttcaatcaactggtttgcttgattcctagatagtttcaaaacatttgataaaagaacatctaatcgaaaactagacacagataaatccagttctcgatactgttctagcttatctattttctcggtgaaaggacgttcctccagcgaaacaggtatacgaccaattttctttagtccatcttgaaagagaagaagaaactgctgattaatcataatctgcgcccgttcttcatctactaggatatctccaaaaagtttccgttcaatccctaattgattgatgactgtccctaaaatcttagcatgcgttaaatgttcaaatttattggaatacacaatttcctggagagatatttcaaaatctgaaaactctggttggaaataatctgggtataataaaactcgaacatactcactcgagacgaattccccactactgctacaagcaagaccataggttttggccaaaatctttaatagcttctcctgatgaggattgataaaaggagttaaaaaaggagcatagctatcttctaccttctttatccattccattcccttgtcaagaaatggacgatcttctatggagaaatgctgataaatccctttattcatcctatcatcgccagaaaacgcactaggttttctcctaaaaatcgaaccaaaacaatcgcaacccaaacagataaatcaagacccgctatctgtaaaggcaggcgttgcaagggagcaagcactggtttcaccaacgctacaatccaacgacctaaactggattcgtaggcacctggaaaccaagacatgacagcgaaggctaccaaaatcagggagtaaatatccactgcattataaatcatacgaattaaaaaaatcattatcgtactctatttcgcttcatatcaaaaccgaactcaccctgttgatcttcatctggtaaacggatatcttcaacatttacaataacgttcactggtgtcaacaaatacatggtagaagctacctttttcaaatttccagctaaaacatgacaagctccatccaaatagtccaaacaacgacgagcctgcacctctgtcatatactgaaaatcaatcaagatactttcgtttcctgccaataaatcaacaatttctgttgcatcctcatattttctaggataacgaacatctataatgaccttatccgttgcacgctgactctgatttgccaattcctgttgtcttgcatgaagtctggtgatattgttctcttttgtgccagccgactgtgaaggttgattcattgggagagccggttcctgtgaagaatttactgaagtaaacacaggctcatctcttttttcataagggagacttgaatcctcatcctccgtaaaataatctataaatctatcgaatctatcttttaaagacatggttctctcctacttaaaaaatgatgtacctatacgaacaaaagtggaaccgaattgaatcgcttctttataatcacgactcattcccatacttaactcggtcataggcatatttggaatttgtttctcttgaatttctctttgtaaatcttgggccgccttgaaaatctctttcaactgctcactgctagcctcaaaaggtgccatcgtcattaaaccaacatattcaatcttatctagtctggctaactctggcaagatttccagcagttcctctctcgaaaaaccgtgtttgctttcttctttagaaatatttacttgaaggaaacacttgatgactcggtcacttcttttttgaatttcccctgctagctttactgagtccaatgcatggaaataatcaacgtattgaatgacatctttcaccttacgtctttgcaaggtaccaatcaaatgccaagtcacatctcgatcttttaaagcttcatatttttccagaaacttatctacacgattttcaccgatatgatggacacctagcggaagcaaggcttccgctgtcggtacatctacatacttggtaactgcaatgacagagaccgaaccactctctcgatgagcactcagactagcctctgcaacttctcgaaaaacaagttctgtattttcttttacattcatttacttaacgatttttgaaaaatggaggtgtatccaattcatcttcatcttgtgaaattggggcttcaaagcgctcgactggagaaacgactgaatctgttgtacgaacaatcgattcacggcgaagatcccaatcaccaaaagcagatgcctgagttggttccaaacgacgtggattttgttttggcaattcaactgtttctgccatatcaaaatgacgatcaaagccatgtgaatgagctggtttcactgtctcacggtagttagtagcagatctagcttgtggagccacaaccttttctacgcggtcttgacgaacacccgttgcaacaactgttacacgaatttcatcacgcatactttcatcaattgaagtaccgagccagatgttcactccttgacctgctgcctggttcacaatttgtgaagcctcttctgcctcaatcaaggttaagtcaagaccaccagtaacgttgacgataacatcctcagcaccgtcaatagttgtttcaagaagtggtgaatagattgccttacgtgccgcttctaccacacgttcttctccactaccgataccaatacccataagagcattccctttgtttgccattaccgttttcacatcggcaaagtcaaggttaatcaatcctggattggtaatcaaatcggtaatcccttgaacaccttgacgaagaacgttatccgcttcgctaagagcctccaaaagcggtgttttcttatcaacaatttcaagcaaattgttgtttgagataatcaatagagtgtctacatgctcacgaagttgattgattccttctacagcaaattgtccacgcttacttccttcaaaaccaaagggacgtgttacaacaccaactgtaagcgcacctaaatctttggcgatacgagcaataacaggagcagctccagttccagagcctcctcccataccagcagtgatgaagaccatatcggcaccactaatagcttccgtcagtgtttcttcgctttcttcagcggctttacgaccaacctcaggttgacctcctgcacccaaaccacgagtcaatttaggtcccaactgaataacagtctcagcttttgtactactcaatgcttgtacatctgtgtttgctgcgataaattctacgcctgtaacaccttcgtcgaccatacggttgatggcattgccaccacctccaccgacaccaattactttaatcactgccccttgagcagcagctgtatcaaatgaaaatgtcataatttatttttcctctttattcgtcaaacatgcttccgatcaatccacggaaacgatctgctaatttcggtttattttgtgaagcttgttggaaatccgccattggttctgtaggcgccaccggctctacttctggagcaggagctggttgaacaggcgttgattgtacaaactgagctgttttttgcagcatcccaccaaaactaattggctgatgacttaagtcattctcaccttttatcgctccctgagccaaaagattaacttctgttaattgacccgcaaattctgataaactaatcacatgcgcaaaggctggattacggataccaacttgatttggaacataaagcttgacacggacgccaaagacttcctgagcaagctcaaccatacctggtaaaatggcattcccaccgattaagacaataccaccagggaggtccaatagacgccttctatctaattcttgcttgatttgttcaaggatgtgcttgattcgtgcagaaataatttctgacaagtaggcttccgtcacttcgactgcttctacttctccaataacctctacttggaaggtttctttgcttgcaagaggcggataggcttccccgtaattcagtttcaagccttccgctaatttgcgagaggttttcaaaaccttggagatatctttagttacataatctccaccttcttggagaatatgtgtgaactggagttcttgattacggattgtagcgacagtcgtttgacctgcccccatatcaatcactgtagcaccaaattcacgttccccttcgttcaaaacagactgaaccattgctagtggtgaaatgataacattttcaacctgaacacctgcacgctcaaccgtcttacgcaaattgtgcaagatagtacgaggtcctgtataaagcaaaccacgcatttcaaggcgaacccccatcatgccacgtgggtcacgaatcccttggaaaccatccacaataaattcttcaggaataaaggtaatgacttcacggtcaggtgtcatactctttgtcaaagctgatttgacaacattttcaacatcttgatccgtaatttccttagtatcagatgttactggaatcatcccctgagttggttctacctgcaaaagattaccaggcaagccgacattcactgatttaatcgaaatgcctgccttttcttccgcttgggaaatggctgacttgatagcagttgctgctgcatcaatatcaacaataattccatcctttacacctttacttttggcattactcacgccaattacatttaattcaccatttctctgctcggccacaagcaccttgacagagcttgttccaatatctagacctgtaaaaaagccttctctagccattacatcgcttcctctctatcttccaagtttcgcacttcgtattattccatagctaaacataggcatagctattcacaaaatattataacacaaaaaatttaatcgtgcttgcttttttcctaaatttcccagccattttttgagtttgtctattcagaaattcttattttataagctgcttgtaaaaactctctaagagcaaaaaagaaagctctgtgttaagcttcctttgcaatcattttttctgcttcttgagctaaaaagaattctaagattttcttagtcaaactgatagtagctaccagcacaattgaaacaagtaaataattagctactagaccgtgatccccaaccaatggcggttttgtcaaaaatccgtaatcgccacctgtcaccaaattgaccacaaaaatcaaggcatttagggcaaaggtcatgagaaaaattcccttcacatccagcaatcgcgcattatactgtctcaatagataaactagagagttccccaagagtgctaaatgaccaaagataaaggatagaatggtgatatgtggaaaagggtaagcatctggcactggataaacaaaggctgctaatgtcccaaatgttcccaataatgcaaagtattgtttatatttggattgaccaggaagcaagagtaccacaaacatagccatacggcaatggtaaaagggtaggctttctgacagtggcatatgattgacccagtaccaaccataaagaaggattaactgaacagtctgcaagatttggaaaaatcgttggtaaaccttcttttcacgatagcgatgggctgtataaaaggttaaggctaagagcgtaaataggctaacataccaaaaaaggtcaaatttgggcggctcggttgcctgagtcgtaaagaaaatatcccataaattcatctagtcttcctcataattcaaaattttcctgcatattattataccatgctagttgttaaaaatggatttagaaatacgataatcatcttcttagtcaagatattgccccctatgaccttgataaacctgccaaagaagctctatttgctccttggtaatgcgtttttcagataagttcggcagttggtcaatggcaaaaaattgaaggtcagcaatttcttgattttcttggaattgtccatcaagaagcttacatccaaaaacaaactttgtatactgtttgctctgtagttggaaacgattggtatcaaaaacagctagcagtctttcaactttggctttaaaaccggtttcttcttcaatttccttgagaatattttctgttggagaatagccgacttcaccaaagccacctggcaaagcccaactatcctctccttgtcccctaaccagacaaatcttctcatcctcaacaatccaagcacggacgtccattaacggagtcgcataagcagaagttggcttcaagacttctgccacttcttcggaatcaaggtctgatgcttgattcaacatttcagataacagacttcgcaagtcttcgtagcgctcacggtcaaacggatcttttgtaaaggttaagccagtatctgtaatggcaatcattctttgcaaatacttgacaaaatcacttgtcttcattttctaaactttctaccaacttggctagattcatagagttagagcctttgagcaggatttggtcatgggctccaaggctttccttgacctgcttgactaggtcttcaaattgatcctggtcttctgttttcttgaagtagtaaacgtggccgattgggaacatttgactggccaattgggctaattcagcaatattttctccatagaaaatcacggtatcaagcacatctggagaaaggctcaaaatcatctgattatgaagttgaacagactggtcaccaagctccttcatatccgccaacactgcaattttcttgccaccttcattggctggaatggcagagaaagtctctaaaatcagtttcatagcagttggattggcattgtaaacatctgacaggatatctgctccattggctgctttcttccactcggtacggttacgcgtcaattcaagatcttggaaggccaaacgaatttgctcctctgaaactccttcttgcaaggcaacataggatgcaatcatagcatttgtcgcattgtacttgccagttactggcaaatcaagggcttgctctaagaaattggccttgaaggtcagactatctttgcgctcaaccaagtcagtaatttccagctctgccccttgcccaaaacgaaccacctttttatcagttggcaaatagtcctctacgatagggtcagccggcgctaaaagcaaggaacctgaagccattccgtctgcaatttgcatttttcccttagcaatctctgaacggtctttgaaaaaggccaaatgggcttctccaaccaaggtcacgatggctgtttttggacgagccaattcagacaagagatgaatatcgcccaagtgatcctgtcccatctccaaaaccaacttttctgttccttcaggcatatgaagaactgtgtaaggaaggccaatctcattattgtaattgccttgtgttttgtaggtcttgtatcttgttgacagtaaatgcgccaacatatccttagtcgttgtcttgccatttgaacctgtaacagcaaagacatcaacagtcgttttttcaagatagtaggatgctaaggattgaaaggctgtcaaaacatcatctactagaatgtaaggatgatttgagacctctttctcagacaaggttactgctgcaccattttcaaaggctgtttcaataaagtcatggccatcacgcgcacctttaagtggcacaaataaatctccagttccaatcaaacgactatcaaactcagctttttctaactgggtgtcctcaaagatactgatatcatttttggctccaacaacttgggcaatttcatggattgttaatttcatttctactcctttaaaaagggctgaagtccgagaactctagtcaccgtgcagtgatggttctggcttctaccctctctttcattttatatcaaatgcgcttcgcgcttgtcaaaactttccttggcaaggtcaaccaaacgctcgattagttttgggtagctgatccccatattgtcccaaagtagtgggtacatagaccactgggtgaaacctggcatagtattgagctcgttgagaaaaatctctcccttatctgtatagaagaaatcgcaacgagatagaccaaggccaccaatggcacggaaggctgtttctgcattttgacgcatgacagccaccacatcatcactgattttggcaggaatatccatagtaatattgttatcaatatacttggcatcgtagtcataaaaggcaacgtccttgacaacttctcctggtagcgtgctcttgacatcgtagttacccaagaggccaacctcaatttcacgggcattcactccttgctcaaccaagacacggctgtcatatcggaaggcaagttttaaggcttgacggagttcttcttggttttcagacttagaaataccgacactagaccccatgtttgacggcttagtgaagactggataagccaatttttcttccacttcagcgattttagcagtcacatcatcgccttcaacgatagccacataaggaacttgggcaataccagcagattccagaacacgcttagtcgtgattttatccatggcaagacttgatgacaaaatgttgcaaccaacgtaaggcattttcaaaacttccaagaatccttgaacagagccatcttctcccattggcccgtgaaggactggaaagaccactgcaccttcttcgtagatagcacttggtgcaactttcttatcccaatcaatggtttcattggtcatgagacggtcttcttgccccggagcatgactaaattcctgtgttttgataaagtcacctgactgactgataaagaaagtcttgactgtgaaacggtcgtaatcgaccgcacgcatgacactctcagctgaaaggacagagacttcgcgttccgcactccgtccaccatataaaagaataatcgtttgtttcatattatttgtcctaattctactagaatactcgctctttagtatatcatatttgcttggttttttaaaacttgaacctgagcctactcatcacactatacaaaaagaggccgataggaacgattttcagcctctttgattttttataaatgaatggagttcgtaaatttgcctacacttacaactctgtccgattttcaatggctcgtaagagtgtcacttcgtccgcatactcaatgtccgctcccacagcgagacctcgtgctagacgcgtaaccttgataccagccggcttgagcaaacgtgaaagatacatggaagtcgcttcaccatccgctgtagcattagtcgccacaatcacttctgaaacctcactatccataagacgagtcataaggctcttgagattgatatcgtccggactgataccattcataggagaaatgaggccatgaaggacatgatagagtccatggtattcttggatattttccatggctgccacatctctactatcctcaagaactaaaattgttgtctggtcacgagtcggatcagtacagatagaacaaggatcgtcgtctgtcaaacgtccacaaatagaacaatatgtcaattctctcttagcagaaaggagattttttgcaaattcattgacatcatcagcagacatcccaatcgtataaaaggccagacgcgtagccgtcttaatcccgatacctggtaacttagaataactgtcaatcaacttggcaataggtgttggataaagcataatttcctttctaattcattggatggtatttttgatacagattgataatgtcacgcgcaatggaaggtcctacaccatttgttagattggtattatgaggaaagaccactgcgacagcgatttggggattatcagatggggcataggccaccgcattggtattggttgcttgctgaccatctgccacatagctttcggctgtacctgtttttccgctaatggataccaaggcaccatttgaaaaggcacgtccagttgtcaatccactagtaccatgggcaacctgataaaaaccttggtgcaagatgctcatatcggagtcggatatattgaccttattcatctctgtcggttgcagttgctgaatcaagtcacccagtcctcccttatcattattaccataaatgccttcaacaatacgaggagccacacgaacaccattatttgcaatagttgctacatactgagccaactgcatcggcgtatagttatcaaactgcccaaaggcattagtaatgtaattagcaaagctatactctttgggaacaaatccagtagattcatctggtaggtcaattcctgtcgcagtacccaagccatattcgccaaaggttgaacgcagtttctccatagcagactctagattgctggtgccgacaaacatattgggttgataggtttgccccataagacctaaggctgtttggaccatataggtatttgatgaatactccagagcttggaccgctgtgatagggaatgaaccgtaagcctgagtataccaagaattgatgggagctgaaccttggaagacaatggactggtctgtcaaggtctggtttcctgacaagactccattttcccaacctgagctgatggtcgccgccttgacaaccgaacctggaacaaagacattggttaccgttcccaaggaatcaggcgtcaactctcccgttttcaagtcatgtttaatccctgacatagacaaaaccgcacctgtttttgggttaagggcgactgcatagacaccttcagaatacttggctccaccattttctagctcagaattgaaataacttttcagtaaagcatccacgctatcttggaaagccaaatcaatggtcagtttgatattgtttcccttactaccttcctcaattgtatccacgctttccatattgccatatttatccagatggatttcttttaccgagcgttttccttgtaaggtctcttcatattgcttttccaaataggaggttcctacacggtcatttagagaatagccttttttaagataggcttctgcttcttccgctgggagaccagctttttcactggatacactcccaactatagaagaaagggaagtttccaaaacctttctatcccaagaagtagaaatactaatgccaggcatctcctttgaaatagaggcaataacagccacctgagaatcatttagaggatctgtcgcaatggttcctgtcgcaaagtttccaacagcatttaactgactaaaaagatagatttctttcttttcatcctctgtatagtttagttgactcgtttgtacactatcgaccgcattgttatacagttctgattcggatagacgattgccatctgaatccaagcgtttctcacttgggagagcttccactatttttttatagatttcaggatcagccaaatagtaatccgccagctggcgttctgtcaaatttggagaactgatgctcacataagtcagtaactttttagctgtttcttttaagtctgtagccgtcattttattgctacgcgtaaaggaaacaacctgctttaacgtattttctaccaaaggttttccactagcatcataaatttccccacgggctgaactgcttgtaatcttggtctgactagctgaagctagctttttttcgtaaaaatccttgttcaaaacctgcatatacaacaaacgaccaataatggtcataaagagtaaaatgacgattgaaaacaataaattaagccgaatcggaatcgaatggctgttaaattttctcatacaaatcagtctcatttctaacttaaaatcttactcttaattgtaccacaatttgagtagaaaattatggaaaagagagaagctttttcgattttttcgtttttaaaacagagatgcgtttttatttatctatccttatattatgtgttataatgaagtgtgactattctctgatctagtcttccagtatgactcatgtaaaggagctttccctatggacaaaccagatatcgcaactatcattgattcacattttgaagaaatgacagacctagaacaagaaatcgctcgctattttttgcaagctgaaacgattacagatgatttatcttctcaacaagtcacccaaaaattacatatttctcaagctgctttgacccgctttgctaaaaagtgtggctttactggctaccgagaatttattttccaataccaacatcaggcagaaaatcaagccaaccaagtctccaagcacagtccactgaccaaacgagtcctcagaagttatagcaatatgagggaacaaacacaagacttgattgacgaaatccaactagaacgaattgcccagctaatcgaagatgctgagcgtatctacttctttggaacagggagttctggcctcgtcgcccgtgaaatgaaattacgttttatgcgactaggtgtggtctgcgaagctttgacagaccaagacggctttgcctggacaaccagcatcatggatgaaaattgtctagtactgggcttctcactttcaggctcaactccttctattttagatagtctattagatgctaaggagatgggggcaaagactgtactctttacaagtgttcccaataaagatagccagacctatacagagactgttcttgtagccacccacagccaaccctcctatatccaacgaatatccgctcaacttcctatgctcttctttatcgatttgatttatgcctactttttggaaatcaatcgcgaaagcaaggaaaaaatctttaatagctactgggaaaataaaaaactcaacggctatcgtagacaaaaacgtgtaagaaaatcctagtttggctgagccaaactaggattgttttgtcttaaaatgataatatgcacccaacatccctgctgtattttggtgatgggcaaattctaatcgtgttttttctgctaaacttggtaccaaagcctctttcaaggctgtacggatcttaggtttgaggatagcctcttgccccatgataccaccaccaagaataaccacttctggattggcaacgtagcaaatatttgccagaccttttcctagatagtcaaccatacggtcaataccttccatgcagattttgtttccttcagtggcttctttgaaaattctacggccattccactgatcaacatcttctccatgggcttcagctacatatttcactaaagctgttgtagaagccaagtcttgaaaagctccatcctgcatatgcatatacccgacttcacaggctgaattgctaaaaccatggaagactttcctatccataatcaagcaaccaccgataccggttccaatggtcaagcaaagtgtcacacttgctcccttgcctgaaccagatactgcctcagcaagacctgcacagttgacatcattttcaatctcacaaggaatagtaaagctttcttcgatttcctttttgaactgggtgcctgcgtagttagggatttgcggcccagcatagaaaatctcacccttatccggatccaccatcccagcagaagatatggcaacacctgctactgggcctttttctaaataactagctacgatatctttggtcttttgtaagatatgaggtccacccttatgcgcctcagttggcatttcatgcgattcaagaagttgcccctcttgatcaaccaaaccatacttgatgttggttccaccgatatcaattgcaacgtaatatgtcataaatacctccttttagattagaggaagcgctccttggtttcacgaatcaaggcagcagccgcttctacaactggacgatcttcttcagtcactggtgtcaatggtgaacgaacagatccaatattcaagccttcattgattttcaagacttctttgatgacaccgtacatatttccatgagcagaagtgagtttaccaatgattgcgttgatagcatactgcaattcacgcgctgtttctaggtccttatccgcaatcaactgattgagtttcaagaagagttctggcatagcaccataagtaccaccgataccagccctagcccccatgaggcgtcctcctaggaactgctcatcaggaccattaaagacgatatggtcttctccaccaaggctgacaaaggtttggatatcttgaactggcatagaagagttcttcacaccgataacacgaggatttttcaacatttctgtgtaaaggcttggagtcaaagcaacccctgccaattgaggaatgttgtaaatcacgtagtctgtgtttggagctgcagaactgatatcgttccagtatttggcaactgagtattctggcaagcggaaataaattggtggaatcgttgcaatagcatctactcccaagctttcagcatggcgagcaagttccatactatctttagtattattgcaagcaacatgggcaataatggtcaatttacctttgctaccgccatgacttcttccaaaatcaacttgcgatcttcaacgctttggtagatacattcaccagaagaaccattgacataaagaccttgaacacctttatcaatgaagtattgaaccaaggcacgcgtacgttctgggcttacttctccttgatcatcataacatgcgtagaaggctggaatgacaccttcgtattttttcaaatctgacatagattttctcctattatttttattttctgctaaagcagatttttctttacttctttagtatacactttaccgaaaaggctttcaatatcttatagacacttagattttagtttctcgcttatagaatagcgtttggagcctttgaaagtagtttcagaaataaagctcctattggtattttgcgaaaattttctccatcaatccagtctggataaagaccaatagtccaaacccaaaaagtaggaagactgagccacctaagagtagactgaaggcggacagataaagaaccatcacaatgaggacaagaatggctaacatgaggaagaaccaaggaaagttaaaactagccaacatcaatcctttttgaagaatttctttccaagataggtcataacgtgccgcgatagggtaactagccagcatcacgatagtaagaaaaatcagaatacctaaacaaatggctttcagcaattggaagggcagagctgtttgaccccagaaaagatagagatctgaaagggtaagaaacacaattcctaactccattaaacccagctgaagacctagtttcagattttgcttgaaagatcttagatagattttaaaaacaggcacccgtctgctcttcttaacttcgaacatggtctcgtagaggctgattttagccactccaatcgtcacgatgggtaaacaagagacgacaaaaagaagattggctgtcacgatgtccaagaccttctcactaaaacgcatgagaaagttatctgtatcaaatgctgccttgataaggcttactcctttttgtgccatgtttgctcctccatcatttttctttgtaaactgttttcttttttgtcagtaaagctttcataagtccctaccatgaacaaatctattttttcttttggacttttttctatttttatctatgggcttataatcatataccccgaacagcgaagcaattaaaatagtactccaagtatgcctatcaaatccatctagccctccacgaattatcattgcaagcactgtccaagctaacatattcaataaaaaaatacaaagtgctttcattctcgcattttaaaagtttatacgaccattgttaggaattttatcatatgcatcccaagctgcagcaatattgttggcaaaattaccatatacatcagctacattcacagctactcgtaaaatccatccagaaatcttggtcagtaatcctactcttgctgctgcagttgcagctaccctacttaagatcgagcgtgccatactaataccatacttagccgcataagtacctaattttatgtatctaccaatcaatgcattcacaatgcccctaattatccaagccatctcatcaactgtaatcccctgtccatctaagaaactagctcttgcagcatacttagaagataccaatttttaaatattttattctcatttctctacctcacaaagatcaatttcatggtagagtattatcaaagctttacaaaaaaacaattcatcctatttttaatcaatcaaaattttaaagagatattttcgaaccttttcttccatgcctgcataaccatttggctgatgtggctcacctgggaagaaaatcgcaaaattgtgataacccaacaagagtgggtagtgttcatgacaatgaacaaagccaatgtcactcgcttcgtcgaatgctactgcctcgtctttgatacgtgaaccgtagctcgaatattcatgtccttctaccagcaaatgcaaatctgcatagttcttatgatactcaaattgatcattttcagcttgattgaggacattttcctgaacaactagaaagactttatctccatcaatatcatactttcctaattcgaaagaatccttacgatgttggtagagatagtcgatagccttgtctaaattaggatgaatccctttgtaaaaggtgatgtttttcaaatcgtcaaaaatcatactctttccttcgtttctgatagttaactaaaaccattcttaagtttataagtgtctgacaaaacttcataaagtaactgcataccctccattttgtagacacttataacctctatattctctaaatctataaaatatacttctgtatcttgatagattgattttcctatactcaatgaaaattgaagaacaaactaggaagctaaccgcaggcaatacttaagtatggcaaggtgaagctgacgtagtttgaagagattttcgcagagtattatcctttgaccgctcccatagtaataccctgtgtgaaggatttttggaagactaggaagactgtgacgattggaacagcagcaagggcagctcctgccataatcaaaccatagttggttgccatttcagcctgcatggtcgcaaccccaagtgagatggtcaaattgttacgtgaagtcaacattaccaattgcatgaagtagtcattccaagtattgatgaaggtaaagattgcaagggctgcaaaccctggtttcacaatcgggaaggctacactccagaaggtacgaatctcaccacaaccgtcgattttagctgattcaagcaactctgtagggatattttcactgaactgtttcatgaggaagacaccgaatggccatccaatcaaaggcaagataactgcccagagagtatcatggattcccatgaagttgacgatacgtaccaatggtacaaggacaacttgttttggaagcgccatagcagcgataaagatagcaaatagaatgcgttgaccatagaaacgttttttagccaatacataacctgctagagatgaggttgcacaaactaagaacatggttaccaatgagataaatactgagttccacatccattgcaaggcagggttctgcaccatgagttgttggaagttttccatggttggcattttagggaaccactgaggaggaataacaattgtatcaggttgtgatttgaatgcccctgtcaaaatccagtagaatggaaagatgaacagcacagtcaacaagagcaaaatgattgttgaaataacagtaaaggctgttaatggttttttttctgtagattgcatagctgtctcctttctttagtattctacgtcgtttccaagtactttaaattgaacaaagcttacgatagcaatcatgactgccaagaagacaccaattgtgttggcatagccgtattctgtcaattggaaggctttttcgtaaaggtagtacatcaaggtacttgttgagtagtttggaccaccagatgtcaaaagctgaatcaaggcgaaacactggaatgagttaattgttgtgatgattgcaatataaagagttgttggaagaaggcttggccatttaatcttccaaaaaacttgaaactcagttgcaccatcaacacgcgccgcttcaaccagtgaattgtcaatattccccatggcagcgatataaaggatgatgggctgaccaactgaagtggtcaagagaataatcataatcgccatcaatgcccagtttttatctcccaaccaagaaatgttttggctgatgatgtggctggacttaaggacaaagtttagaatccctgatagtgggtcataaatccatttccaaacaactgtcacggcaacactacccgttacaacaggaaggaagaagacgaaacggtagaaggatctggcaatgacattttgatgataggtctgagatgctacaaagagtgagaatagaacaacaactggtacagatccaataaccaaaataactgtgttaatcagagattttgtaaagacaggatctttaaacatacggatatagttatccaagcctacaaactcaaatttagtcattgagtagttaaagaaacttgtaatgaagcccatcaccatcggagccaacacaaagatgacaaagaagaataatactggtgctaggaaagcgtaggaaatcactgtttcccgcatacggattttattgactttcacagtcggcacctctctttcaaatagaataattttttgactttcttgaactgttttaaaatcaaaatgaaattttttatgattcgcttatgtaagaacttcattttaatttcgtgacagtttcttacattttaaacaaaagcccccttttcttacactatctgtgtagagggaaaagggggtatacactcttaggttctttaaaaaactactttttatagaataactaaggactattgtttcatagcttttttgattgtttcgttcgctttttcagtgaaggctttcaaagcatctgctggtttttcgtcaccatttgatacagattgcaacattgggaaccaaagtgttctcatttcagcaaatccatcaatagtgttgtagtatggtgagtagtattgagtccagccgctgattgtttccatgcgtttgtcttcataaagttttccaaatgaagtacggactgggaaagcacctgtacgaactacgtctttaggtccccactccttgtcatctgcgataaactggatgaatttcttagatgcagcgactttcttgtcgtctttattgttgaatactgcaaacccgtttacaaggtactcaagagctggcttaccttcgtctgatgggaatggtacttctaccacttctaccttacttgcttctaaaagtttagcttggataccattttgagctggtgcccaaaggattgtgtaagatgtttgaccgttggcaaagttttggatatctgccccaccgtcaaattgtgaaccattattgatcaaattgtctttaatccagctagttgctttttcaagacctttgacgaatttaggatcatcagttgtatatttgctaactttttcatctgttacagaaccgctataaaggttagagataaaggcacgtgttccttggtctcccccttgaccagaactgaacaatgaacctggtgtgtaacccttgtctttaagtgctttcaatactttttcaaaatcatcagttgtccaaccttcttttacaaggtttgctactccagcatcttctaacattttcttgttcattgccatgtagaatggggcagaactaatcggatacatataagccttgtctccagctttacttgcttgtacgatgttttcattgttgacatctttaacaaattcatctgtgaagaggtcattcaactcagccaatttaccgtttttaccgtattggatgatacgtcctggtgcatcaaagagtacgtctggagctgttcctgcttcgatggctgttgtgattttttcaggacctgacttgaagtcgatggtttccaatttcacttttatatctgggtttgctttttcaaacgcttcgatgattgatttttcataagttccaacaccgtcaccagttttttcttgggtaaatactgggaatgcccaccaagtgatttctgttttggcaccgtcaccacctgatttggcagcatctttacttccgccagaattgccacaagcagcaagaccaagaaccgcagcacccgcaagtactgtacaagctaattttctaaatttcatttgtattctcctatgtaataagcgtatccaacttggataatgagttctttatttcttgtatgcgatttcatttcatcctactcatccatcactctcctctgttttttattaagtcagtaagtacttaatcatctacacctaaaatttcattaatactatttttatataagattgcttttgctccatagattgcttgaatgccacccttcacttctaagacatcaactgcaccaatttgttttaaaagtgctttatcaacttgattaacttcttttacagctacacgtaaacgtgtcacacaagcatctacatcttctatattatttgatccacccaaggctctgataatttgtaggctatcctgttttaaataatctgcagtatttgaagttgaatctgcggattcagaaatttctttagaatctacttcttctcctcgccctggcgttagaacgttgaattgagtaatgaaccatctaaaaataatataatacaaaacactccaaataagtccaaatggaatctgaagaacccaattcgtcttagcgttcccctgcaaaattccaaataaagtgaaatcgattacacctcctgaaaatgtgtttcctattgaaatatttaagacgtctgcaataaagaagctaacaccatcaaggaatgcgtgaacaacatatagaaccggactgacgaatagaaacataaattcaattggttctgtaataccggtaataaaagatgttaaagcaactccaaaaaacaaacccgcgtattttttacgacgatttttaggaacactatggtacatcgctaaacaggcagccggtaaaccgaacatcattgttgagaaacgacctgcaaaaaaccttgttccttctgtaaataatccagaatgggccaaatcggctaattgagcaaaaaatattttttgagctccaaccactgtttgtcctgcaacagtttcaacaccaccaagttcagtataccaaaacatagggtaaattatatgatgtaagcctactgctccagaaagtctcattaaaaatccatatagaaaagttccaattggacccgcctgagaaatatatccacctgtagaaacaagaagttgttggaaaggtggccaaataacaaagaagacaaagccaatcaagatagaagagaacgatgtaacaataggaacgaagcgtgaacctccaaagaatcctaaagcggaaggtaattgaatattgttatatcggttgtgcaaatatacggcaactattccgacaactaatgctccaataactccagtatcaattgcagatccttctgccataaaaagttttaccaaagctttgatcgttgcagtcataactaagtaaccagttactcctgctaacgcagcggttcctttatctcgtttcgctaagccaatacataatcccacacagagaagtagtgacaaattactgaatacaacctctcctgcagagctcattacttggaatattgattgaaaaatactattgtctagtattggataagttgctatcgtggttgggtttgaaagtgcaccaccaatccccaaaagtagacctgctgcaggaagtatagctataggtaacataaaagcttttccaactttttgtaaaactttaaacataaaactccccctcacatcttatttaagactagcaacgaagcgttctgtaatctcttttggtctagtaatggcgccaccaacaacgatgcctcgcactccatattcaaggatttgtttggcttgttctggtgtatgaatttttccttctgcaatgacatctacaccagcatcacagagtttcttaatcaattcaaaatctggaccgtctacttttggactgtaggatgtgtagcctgataaggttgttccgacaaagtcaattcctgcttctacagctgctagcccttcttcgaagatactagtatcagccatcaaaagctgattaggatatttctccttaacctgacgaatgaactcttgaatttccaaaccatcgtagcgttcacgcttggtacaatccagagcaatcacctcgatgtccagttctgccaattcatcaacttctttcatagtagccgtgatgaagggttcctgaggtggataatcacgtttgataatcccaatgattggaagtttagtgacttccttaatttccttgatatcgcgaacactgtttgctcggataccgactgctccaccttgctcagccgctttgaccagcaagggaatcacccctcccgcttctgtataaagcggttcatgaggaagagcctgacaagaaacgatgattccatctttgatttgctcaatcaaggcttctttgctaatctgtggcatcctctttcctccttttctttatttctatgagattattataccttaaaattaaaacgctttcaatagtttgtagtataatagatttcagtttcaaaaactagcaaagtcaaacagctcctctaaaagtactttcagaggagcaagtcgacctataaataggagaataccaaaatttattttacaatttctgacaattttactttgcgatcttcaaacatagactgggtacaagcatctgcagtagcaattgcttctagggcagcttcacctgtcaaaagttttgcaaattcttctgatactggagctccttccataatctcatgcagatagcgcatttctttatcaatgacagatgatagccataatggagtacgtttacctggtttaccataagcaattgctccatccatctctgtactatgatagatacgagtccgatcatcatcttcttcttgcgattcgtgaatcaagaaatagctttcttgcccatctagcttaagagttcctttacagttgaataagtctaagcggatggcacctttgcttccttggattaagacataatgttcaccccaacgataagctgaaccccattctaacaaggcaaaacgcttattagaaaattccatattgacaaaaatcatatcatcttcatcaccgaaatgttcaccttcatgggccacatttccacctgtcatggttacagtttcaggcatgccccccataaggaattgaacgcaatccaattcatggatgtggtgatacaagtgaccacctgatttttcacgaatttttttccatgatactgacggttgttgttcttcccaaccattacgagctgtatgacaatatagaacgtctccgataactccttgattaatgagttcttttgcatgatgaacaccattaaagaaattcataatatgtcctgccataaaggttacattgttttctttacacgcatctaccatctcgcgacaatcttgataagaaagcgcaattggtttttcacagaaaacatttttaccatgctgtgcagccttaataaccggttccttatgaagattatttggagttgcgacgataacacaatctacttcatcgctagaaaccaactcatctaaggaacttgctacttttgctcccaattcttctgcaatcgcctctgcattatctggatcatagagaagagtaatctctgctccatcattcttttgcatgtagcgagccaattcagctccaaaataccctgttccaacaacaccgtatttaaccatgtttttctcctttattttgttaaatcattaatttccaaatctatatactgaactacattgcttaaatgcaattcatttctcgaccacgaatcatatttttcaaacagtacacctatgtgatgatttggcaattctgtaatcgcagaataggcataaccatacgaaggcaaatcaatatcatagtggtatttccaatcaatactatcatcttctttattgactaaaccgacaactaattggcctcccttgcggccacttctagaatttggtgtactcaaaatgactgcttcttttccatcaattaattgagagtatttaattgcagatacttgtgtgccatatgaagtttgttggattccatcaatatacgaaactttcgaccatgtttctccagaatctctactagtcatataagctatcttacctgtagtggttctaaagaatgttctaatcacaccatctctcagttcaaccatttgtgcttctgctgttgcatttttaaacggaattgaagctgaggatttcttccatgtttgaccactatcatcagaaatgagataggttagttctccactagtatatgttgcaaaaatcaatctgttacttgattttaatgctaaaccttgtccgggacataagtaagttccattatgtttttctcctaagaacggaggcaacaacttaaattgttcccaactctctcctctattctgactagttgtcattgctatataattagtaggagtcactttaaataacgaatctttgtagaaaacattcataggaacctgttttccattatgcctttctcttaaagagccactatcaaaatcaaccgaatattgttcgactgttaaagactttcctccctccaaaacttcatacttatcatttatagtataatttgtaggtttattagttgtttcattataaacgacaccattttctctaactgtataacggaaatcgttatctccattcttctttagttttaaataataatgaccatttatttctttaaaacctgagtcggctttatttgcattattatttccaatacccgcaggcataacatcagctagtaatatcgttttcccagattttttatcttcaacaatggatgaatctatgaatgaagcacttccactaatttgactattctttaatttattatctcgtggccagtaaactaactgctcctcatagtcattaaacttcatagcaaaaattggctcactccacgttttcccattatcatcactataagaagtggcaatattaatcttacttttagaatcatgagtcccaccataacgtgcatcaatacttgatagaactcttccactacttaatgtatatagtgtcggtattctaaaatagttagcttgagtagaatctcctgattggaaaattaactgaaatggatttgacaagggaatagttgaaacttcctgatcactaattgctttgttaaatagactgatttcatcaatacttccttttgcgaggtaatgttccttaccttcacgattaacagctcctagtgttgccttatctataccatttatatttgaaattggcaaaaatgtatcaactgtttcagagaacacttctattccattaacatacattgtgtatgttttatctttagaatcagatacaaatactagtgtattttcaactgcctgtcctttatgttttccccataatgaagctggtctggaaaataaataatttattcccttttgggcgtctcttatttctacacctatctcaccagaatctctcatgaaaattgaaaagtaattatttttaaagcctgctttactattagataggccaaacaaagcttgaagagagtttggtttatctgctttaaatttcattactactgtctgactctctccagacaatttatctaataacaaagagctgatatctatactcttattgttcagttgatatgaacctccttgaaaaataggagatatggacagttgaccatagtttaattcattcgcatgaatcaaagtggggactcccattaaaagactaatgcctacaacggaaattcctagttttgaataaagacctcttttattcatttttttccttctttcgtctacttcacagatccttctgataatccacttgcaatcttattttggatgatagagaagaaaataattgatggaagaactacaataacagacgctgccatcatatctccccagtctagtatttctgaaccattaagtgaacgaagggctactgctactgtcatctttcctgtattgttaatcaaaatcaaggcatacaggaattcattccaagcattgataaatgtataaatagctgttgctacaatacctggtgctacaatcggtagcacaactttataaaacgtaacaaatttatttgcaccatcaattctagccgcttcttcaattccaattggaactgtttggaaaaatccaactaagagccaaactgcatatggaacactaaaagatagataaaccatcatcaagccaaataaactatttgttaacccaactttagcaatggcaattgaatagggaattgctaacaaaattggtgggaaaatgtaggtaatgacgagtagtctcgacatgattgctcccaatttaggaaagaatcgaacaataccataggctgccatagcagaaataataatcgcaataagggttgtagccaaggcaatgattaaactgtttcgaatgttatcaatgaagtgcaaatcgttgataacatgagtgaaataatctaatgtaaactgttcaggccaaaatcgtgttggatactgagttaattcccctttccctttgacagaagatatgataatccataccaatgggaaaactgcaacgatggtcgcaccaactaaaagtacatgtgagagaatatctaaataaatactggatttcttcttcattattttctaccctccttttcccacttactgatgatagcaaagtagataaagcaaatcgccaccaagaagataaagagcagtactgtaactgctgaagcacgacccaacaatttagttccccagcccaggttgtaagcaaaaattggaagcgtcgttgtagcattggctggtccaccaccagtaatgaggtagataatgtcaaagttattaaagatccatacagttctcaaaacaactagaagtcctacaaccactttaatatgtggaaagacgataaacttgaacacctgccaacttgaagcaccatctatcttagcagcctcaaattgttcttctggtactgtttgcaaagctgaaagcacattaaccataatcattggtgctccaaaccaaatgttgataaacaccaaacataggaatgcccatgtactatctgtcaaaaatgcaggtgtatgttccattaaacctaattttacgattagattaggtaagtagccataaaccccgtttagaatccactgccaagagaaggcaataacgatggtaggaaatgcccaaggaacaatcaataatgtcctatataatttcttgaagtggcgtactctgtgaagagctaaagccaatacaaaccctactaaaacttgaccaactaatgagaaaacggtccacttaattgaattaaagaacgcattaaagaagttgggatctgatagcacagctttatagttagccaaaccaacaaatttataattaggcataatcaaatgcttattggtaaagctataaaaaatactcgagaaaaacggataaacaaagagtaatcctacgataatcatagctggcaaaacaaatatccagcgagttaaattacgttctttaaccattctccttctcccttcttttacaagattgggctagagcttttcagctcactatcccacctattttctagtcttttacatctactgaacagcctcaaataaatcatttaattgtttttctgcttcttttgctgctttcataggatctgttccatttgtaatgatatcttggaacatttgttcaataatgtgttggttagtcaacataccagcttgtacacttggcccattttcataaccaatagcagtaccttttttaacagcttcagtaattacttcttcagcatgtttaaatttcttacgagtttcattttctttataggctgcagaatcgctaatccccttaatagttggcaacatacctactggagttgaatcaaggaatttaacgtagtcttcttcattataaagtgcttctaagaatgctttagcaacttctggatgttttgaatttttccaaacaaccattggaatgtttgaggtttcaattccttggtctttatcagactctttgatttttggaataggataagcatcaatcgaatcaatcaattgaggactgttggcattaattcctccgatatggaagccagagttaaagtcaaatgctgtttttccttgatagaacaaggtagcttgttgaaggacattaaagttcaaagaatcttgaggtgagatttctttatacaatttaacccagtatttaataccatcttgagcaagttggcttgtcaagtctgctttaagatcttttgttaagaggcttcctccaccactacgtacgtagaagttcaagaaacgtgttgccattaagtcatttgttccaaacggaacagacaagccataaactccagcttctttcaattttttagaagcttcatagagttgatcccaagttttaggaacctcaatattatgttcttttaacaaatctgttctaacccacatgacttgtgcatgtgaataaagaggaacagagtagtaatcatctccgatttttgcttcatttaaggcagtttcgttaaatttatcttgtccaatacgcttgatagaatcatttagcggaaccaaagcatctgagttgaccatttccattacttggttaggaagagctgtactgatatctggcacatttccatttgctaaacctgtagtccatttagtatagaagtcattccaagaaaatgtttcaatcttgattttcgtttttggatgcttttgcatgaaagcatctgctgatttttgaatactttctaaacggggtccttgagtaaaggagtgccacattgtaatctcaccagataattctgttggtggttcagtactagttgtagcttctttttttcctgaacaagctaccaaggcaacagccgctagcgcaattccagctagacataaaaactttctcatttttttcatcgttcttctctttctacattaagaaatcgcaactttaaagacaacttttttcacaggttcatcatttatacgaaccttgggttgatgtaaatcttctggaaaagtgatgaggcattcgccagctctcaaatgaaccaactgttccactttccctgtgtataattcaatatctttctcttcatcatattcttgggtaacgcttacattttccggcgatgtaacagccatggcttcttcgttttccaaaactaaatgaatatccaaatatttttggtgggtttcaaagaaagcccctgcttgaccatctgctagataagtaaagcaattcccaaacaatcgattaccatcgatagcaatcgaaccttctgttaaattttctagtcctgttttttctagaaaatctattaatgttgcaaaatgtggatttactcccacataagttcctaaacggctaatttttgtaataatcatctcttctaacctcctttctcaatctatttttcctatccaagttccccattcttctgtctagcattttctactagaaggacataaaaacactactctctagcctatactctttgaaaatctcttcaaaccacagtcgcttcaccttggattatataggtcagtcttatctacaacctcaaagcggtgttttgggcaatctgctactagcttgctagtttcttctttgattttcattaagtatctcctcaatcttcacaaggaggtctgatttttctagcgacaaacagaataaataagttagttcaattagctaccttccttatagatgaaattgatattcatgaaggaagtcgccctttattttttgcaaaagatactagtatgaatctatttggggacttgaatttataagctgctcacttcgtttttctaaaataattctaatctattattctagcactaatagactctttggctaaatctcctttctacatctcgtttcaccaaaaacttttaagagagaaatactctatatttcattctctaaattagttttgttaccgttttcaattagagtatacttttttttttttagtatttcaagtctttttctaatttggaatttagtttcaaatcttttttaactatatcaagtatattaaaagtactttcaaaaataatcaaattcttacaatacttgtttcgagtggacaagataagaaaacaagaaagtcaattttaggagaagacaaggttaatagtcatataatatattgaatctataacagtacaccttgactgctaaaataattctataaattaatttgactttcctgatagagttgttcacatcttatttcaatctactatattttatagaacagactactctgaaagtagtttcagacctcttatgatttcgtatcagcctgaatgtcatcaaaaaaagatagcaggcttgaaaacctgctatctccttctatttttacggttctataatatttgtagtgggtaaatccactatagatattatggagcctattttattgtagaaaaaaagtcccatatgacctataatgaaaagcgacaaaacaactcattagaaagaatcatatggaacaattacattttatcacaaaattactagacattaaagaccctaatatccagattttagacatcatcaataaggatacacacaaggaaatcatcgccaaactggactacgacgccccatcttgccctgagtgcggaaaccaattgaagaaatatgactttcaaaaaccttctaaaattccttatcttgaaacgactggtatgcctactagaattctccttagaaagcgtcgattcaagtgctatcactgttcaaaaatgatggtcgctgaaacttctatcgtcaagaagaatcaccaaatccctcgtatcatcaaccaaaaaattgctcaaaagttaattgaaaagatttctatgactgatattgcccatcagctttccatctcaacttcaactgttattcgtaagctcaatgactttcactttaaacatgatttttcttgtcttcctgagattatgtcttgggatgagtatgcttttacaaagggaaagatgagcttcattgcgcaagattttaacaatctcaatatcatcactgttcttgagggaagaacacaagctatcattcgaaatcactttcttaaatatgatagagccgtccgatgtcgcgtcaaaattattactatggatatgtttagtccttactatgacttagctagacaacttttcccatgtgctaaaatcgtgttggatcgctttcacattgtacaacatcttagccgtgctatgagtcgtgtgcgtgttcaaatcatgaatcaattggatcgaaagtctcatgaatacaaggctatcaagcgctactggaagctcatacaacaggatagtcgtaaactcagcgataaacatttttatcgccctacttttcgtatgcatttaaccaataaagagattttaaacaagcttttgagctattcacaagacttgaaacatcactatcagctctatcaactcttgctgtttcactttcagaataaggaaccggagaaatttttcggactcattgaggacaatctaaagcaggttcatcctctttttcagactgtctttaaaacctttctaaaggacaaagagaaaatcgtcaacgcccttcaactacactattctaacgccaaattggaagcgaccaataatctcatcaaacttatcaagcgcaatgcctttggttttcggaactttgaaaacttcaaaaaacggatttttatcgctctgaatatcaaaaaagaaaggacaaaatttgtcctttctcgagcttagctgacttcaacccactacagttgacaaagagccatttttacaaaatcaaatgtttagaattcttctcttattgttctctctttttccctagcgtaaacagaccaaggaagaaagctgttagtcctagtgaagctaggaggtcactctccttgtttcctgtttcaggaagtgcctgctgagcaagaggagctttgtaagtataatctttttttgtagtaagagttacaagcgaatcagatcccttatactctgcgatttcatgaacagctggctctgtaccattaactccccctgtaaattctggaacttcatgcaccgctgctttgctaccatttactccgccaggaactctggcacctgctagatttacaggaagattatgcatactttcgatgcttcctttagctataccaataatttcctgtccgatatcttccttatctactgcaaacaacaaggtcttgctatcatactgggttaggaaagtcgctgttttaccatttgccaattgaagggttggagccttgttgaccaatacttctgagtcgaactccaagccaataactcctttgcccatctctcctttgcccatctctctagttcgcttcggtaggagaaatcagatttttgctcaaaaattcccaattaaattttctaaatgatagggtataggcattttgtcctttttcagtatgttcatacaagatgccatactccccatttcctaattcttggagcgaattataggcaaactctcctttttgaattggattgtgtttgagccaagtcaactcaccattttcttcgacacgtgccaagtggaccatcccattttcacgtttcggtccacctgcattactgaggatgatgtattcttttccttcgtgcatcgtatggatagcagacatttgaacatagacatctttaacctgtggataacgtttgatatccttctcccaagtcactcctccgtctttacttgtagcaacctgaagatctccagtcaaaccacgcataaagagtttaacatctccattgtttagttgtaccaccgttgattctgtattttgcgcacgtctattgttcatcgtagaagagtggatcttttgaccgtctacctgacggttatcgttgaccgcttctccagcatgccaagtttttccatgatcatctgaatagatgacacgagaagattgcgagccatctaagtgagatacattattagtcgtataaaccggtatcaaaatccgtcccttgtgaggcccattccgaagtacaattcctgttccaggacctacacccaagaatttcatccaatcggctttgaccatcggagtaatatcttgaggagctgaccatgtcttcccgtcgtcatcactgtaggacatccatagatagctatccttggcaattctaaatggagaagttttgtttgttgtgaagtagatatttcctagtaattggtcacccttgtatagatcacccttgtcgctataggctggtttaacaggatctacaacaacgcgatagtctgtcgccttaccatctggtgtatagacagtaccattttctcgaatggtataagctcccttttctccttcacggtagaggatttgataggtttttccatcgatttttttgtaggcttcttctttttgtgaagacattccaaagattcccttcccttctgggaacatgtcatagatagaaaagattcgtttggtttcaggatcttgaaccaacaccatatcgatattcactggtgaaccgatcgatgggtcagaagcttttggattgtcacgtaagttggtaatggttactcggtcaccccaagttttaccattatcttcactacgtctgatgaccataccgatatcaccccagtcactcgaatggagacggcgttcatctgcacctgcgatcaaagttcctttatctgtcttgagaagtgctggaatacgataactcttgattccatctttatttgggttaccgttacgcccgctttcgaatatgtccgttttctctgttaaagccgctccttcaggtagttttttttctaaatctgagcgtttaaaaagttgactacgtttttgtacctcttctggtgttaaagcacgattatacacagtgagattccgaatctgtagatttgacccccaaaccgtattgttggcacgcttggttgctccgatttgcacatgcgttacatctggcatatctttaatgaaattgccagatctcagacttgttcgagataataccccgtttacgtagaggcgcactcggcctttaggtagttctgctgtcggtttttcaactgtgaaagtcacagaattccactgacctggtttaacttttaagggtgcatcgttgtaattattgtaaaactgtttcccatccgaaccacgcccctctagagtagcagtattattgtaaactgccatagtgaagtactcatcttttttagtagcacttgacacagaaaagagattatagaatgctggggccttggcatctggcttaaactccatgtgaactgttgcgttttcaagtttctttagtttatctagttcacttgataaatcaactctctgaccatttgaagcattggtttcaacatcttctttttctatcactgtttcgacattttccaaatctcgtgcatagtaatctcttggaattttttcttcttgcttatctttcctttcttgttcttgcttattgccagaaagttcagtctctgaagaaggctggctcttttctgtatcagttagggttgagctctcccccgaaagttgagtttcatttgccagaggttgctcacttgccccttcttgagctaaaacaggagacgttccaaataccactgctcctacaatcatagaaaccgctcctaccgatagtttcctaatgctataacgacacttacgttcttgaacactccgattcatactgatcctctctatatctatatcccgatttctgaaataagacatttactccagaaaatgcacttagtttgtcttttattaactttcttttactacagttcatttaaatgacaaaaatgaactaaacaaactatctcaaattggtgccaattttcccctctcctttctccaatcagactcctgccaatctagtttatctaccaggacaccgctgcaattaaactaaaatatctctttataagcaaatgatggacatcagcctatgctatttacaccatacttcctgctcaatccttatcgaacactttttcaaatagcttttcataagcataaatacttgtagaaataatgggaaatataatcaagctcacaatcagaatcttatccagcttaaaggggacaatcccaaataagtgaagaaataaatcaatcagaaaactgtcgaaaaaaactgtcaaaagtagttcaacttgtctttttctctgcttttttgtcttgaatgccttaaatatcatattattccccttttctaagcttcaatcccttctctctatctgttatttcgcatagctactactatttttacagcaatctatctttaaatatacataaaaatagattctatcactttttataagcgttagtaaatttattatacctcatttttaaaacgctttcaatatagtgtaatatagtagattttagtttcaaaaaattcttttatataataatgtccttgaaagtagtttcagctgaacatttatagtccataaaaagaaaacagaaactcatctgtttttatactcaatgaaaatcaaagagcaaactaagaagctagccgcatgatgctcaaaacactgttttgaggttgtggatagaactgacgaagtcagtaaccatacctacggcaaggcgaagctgacgtggtttgaagagatttttgaaaagtattaacacctacagacaagcctgacgatagcaagaactaccctactcgataggtatcggcttttgctttctgaaaaaaattattttaagcaatttgacaaatctagcaacaaaaaattctataaatataatagattgacactagaatagtacacatttgtttctaaaacattgttagaaatcgatttgactgtcctgatcgatttgtcctgttcttatttcattttactatatttccatgataaaacgcatagtataaagttttcttaatcccctgatactatgcgtgtttgtaatttttaagattttgtgcttagagtcgactccttattttagatatttaaaaggaatctcacttccacagagccagttgtagacttggtcattgacaaatacattcatggcttcgtgagcatactcaggcatgatgcgataggttttatcgcaggtcagacgattataaatcgcaaactgggtaatgggatagcaaacatcgtcgtccaagcccgtaatcatcttaacctcaccttggatacgatgggcaagatttttgacatcgatataggcaagggtcgccatgatttcctcctctgtttcatggaaggggtcgtgaaacttgaaataacggaaaagttcgtcgtaagcctcgctagtattaccaatctcaatcacccgtctgaagtctgacaagaagggataaatggcaactgttttctgaattcgaggattgagcgctgctgcaactagagctagagcccctccttgtgaggcaccatagctagaaagacgcttctcatcaacctgagacagactagcaacaatttcgaccaactggtaaatatccagataaacatccttataaaagaggtggtcccgaccttccacagcaccacggataatatgccccttcacggtatttcctaaaggagaacgcaagccgtcttgtgagtaacctgactggccccgcacatccatggaaacaacaccgtaaccagctacggtgaagcccagcatgtcggcccagtcccagccacgtcccatataaccatgaaaatggaagattaatgggaccttctcctcactctttggaagaacaatgcgtgcatagacctttccttccttgcttccttcaaatgttaactcatagcacttgacttgaggaatgtggaaatctctttcctccaagtggtaggatggaagcgtggaaacatttttcacttccccatcccagaaatcatcaaagtcttccggaacctcatcccttcctctataggtcttaatttcttctagcaaagctggatttttcatagcatgctccttttattttgtaatcgttaccacaactgtagcatatctatgtaatcaatgcaagaaagaagggtaaatagaaagtgaatttagattctttacttttaggatgatgggctgaaagtagttttagaaacgaaaaaagagcatttcgctctctcttctgtttatactagttttttgcttccttcttttggaaagtggtttggtaatttactttaatcgttactgtcatatgagagtcctcgtttctttttgatgactctagtataagagccaaacctaaaaactagcttaatactcttcgaaaatctcttcaaaccacgtcagcgtcgccttaccgtatatatatgttactgacttcgtcagttctatctgccacctcaaaacggtgttttgagctgacttcgtcagtttcatccacaacctcaaaacagtgttttgagcaacctgcggttagcttcctagtttgctctttgattttcattgagtataagttttccttagagaaagcttaatccagatgttctttcttttccagatgaagggcaatcatgcgccactctggatcttcttgccaagcttctatagaactaatgtagctagcaacctttcttgcttcttctaaaatcggaaaatcttcgataatatcagccacttggaactctggaagtcctgactgtctggttccaaaaatctcaccagaaccacgcattttcaaatcttcctccgcaaggacaaatccattggtcgtttctgtcatgatacgcatgcggtctttcccagaatccgtcttgggattagcaacgagaacagcgtaggactgcttgtccccccgaccgacacgacctctaagctggtgaagttgactgagaccgaagcgatcggcatccatgataatcatgacagtcgcattgggaacgttgaccccaacctcaataaccgtcgtcgaaaccagaatatccgtctttctctccttgaaatcctgcatgatctggtctttttcgtcactcttcatcctaccatgtagaagagccacctctgccttgcctgcaaaatgagtcgtcaactcctctgataaggcaatggcatttttcaaatctagagcttctgattcttcaatcaaaggagagatgacatagacttgggaacctttttgaatttccccctctaaccaagtcaagacctgaggtagttgctcatgtttgatccagcgcgtcacaataggcttccgacctgctggcatctggtcgataatggaaacatccatatctccaaaggctgtgatggcaagcgtccgtggaatgggagtcgccgtcatcatgaggacatctggattgtcacctttttcccgtaaaatacgcctttgccctacaccaaaacggtgctgctcatcgataataatcaaaccaagacgagcatactccaccccatcttgtatcagagcgtgagttcctataatcaaatcagcctcacccttggcaatggtctccaagacttctctcttttctgcagctttcaaggaacctgtcaagagagccagtttcaaattgggaaaaaggttctgtaaactctcaaagtgttgctctgcgaggatttctgttggtaccattagggcagcctgataacctgctgtcactgccgcaaacatggccaagccagcgactaccgtttttccactccccacatccccttgtaggagacgattcatgtggtggtcggacttcatatcagttaaaatttcctgcaaactcttttcctgagcttgggtcagggcaaaaggaagacttactttaactgctgtcactttttcctgagaccaattcagaaccagaccacttccctgaactctattttcagacttgagcatctgcagctgcatttggaaataaaagagttcctcaaactttatacggcgaagagcctgcttgtattctgccaaatactttggaaaatgcatagcacggactgcctgacaacgggacatgagtttgtatttgtctagtaaagactggggcagattttcttctatcaagaggtccagtccctgatcaaaagccgtcttgatgaccttgaccagactggcctgactgattccctgagccagacgatagacaggctggaggtcatcttctacctgagccagaaccttcatcccagtcagactagccttagcgcggtcccattttccaaagacagcaagggttgctcccaactctattttatcagccagatagggctggttaaagaaattcaccgcaaaaacgacctctccctgcttgagactaaaacgcaggcgattgcgcttgaaaccataatactggacactagcaggagtcactacctgaccagaaagaactgccttctcaccgtcttccagctccagcacctgcttggttttgaagtcttcataacggaaaggaaagtagagcaagagatcttgcaagttttcaattcctagtttggcgtatttttctgctgactttggtcccacaccaggcaagacatgcaagggttgatgtagattcatgctccactcctttcttttctaataatattctctcggaatacggtcgctgaggaggcaaaccacctcatagttaatggttacgcggtaggtcgctacctgagttgcagtgatttccttatccccattggagccaatcaaggttaccttggttcctagcggataaagcttaggcaatcgaatagtgatttggtccatcgaaaccctgccgacaattgggcaagcttggccatctaccaagacagagaaattttgcatgtctcttgtccatccatctgcatacccgattggcacggtcgcgatgacttgctcgctatccgcttgataagttgctccatagcccatgcaagctccagctggaactgtcttgacatgaaccagagcagactccaaggtcaaggccggtatcaaatcataaggcaaatccaagaccgctccacttggattgaggccatacatggcatctcccatacgaaccgcattgaaaatagtctctacatgccaaagagtcgttgcagaattgctagcatgaaccagctctggaacttccttcatactagctaaaatagttttaaaccgttctaactgggcattaaaatagtcatctgattcctcatcagcagtagcaaagtgggtaaagattccttcaacacaaacaccgtgttgttggagcaaatcttgagcctgctcaacctcacttgcctctctaaaaccaatccgtcccatccctgaatcaatcttgaggtggactgtcaatccagttaggtccacttccttatctaagagtgcttgaatccactccagtccagccactgtcaaggtgaagtcatattctttagctagagcaacagcttcgatttcagaaactcctaaaatgaggattggcttgctgagtccagcttgtctgagttcaatggcttcatcgatattggaaacgcaaaagccatcaacatcatcttgaattgccttggcaacggcaacagctccatgaccataagcattggccttaaccacagccaacttgagcgttccttgagggatatgagcccccatttgctgaatattttgtcgaatagctcccagatgaatcagagccttggttggtctatgtggactagctttcatgattttcctccaaaatgacactggctgtcacaaactgatcggtgtggctgatagacagccaaatctttcctgaaaatggtgcctgactaaaataaggcgccccacgttcattgttcaagacttccaaatcctgaaaaccgagcttgctaatgcccgttcccatagccttggaaaaggcctccttagccgaccagcgaccagctaaatattctatttgcctgcgtcctttgagactggtgaagcgctccatttcctgagcggtcagtacacgcttagcaaatccttcatgtcgtgtaactgcgctttctatcgaagccaattcttcgatgtcaattccgtgtccaactatcattctcatcaaaaggagttgagattccccaactccatccttttcacttattttgtcaaggtaacataaatctcttctaccaaggcctctgtattttcccaacctaggcaagggtcagtaatagagcaaccaaagatctctggttggttttgacgaccatctgctaggtaagattcaatcataaatcctcgaaccgtctttttaattttctcattccaatcacgattctgcaaggtctggcgaacaattcgaatctgctccatatattgcttgcctgagttatcatggttggtgtcaatgaggataaaaggattttcaagtcccatggtttcatagcgttcaatggcttggagtagattttcatagtagtaattcggcatataattgccatactcgttgactgctccacggaggataacatgggccaaaggattacctgatgtctcaacttcctgcccatgataaaggaaggtttgcttgttttgagcagcatagatggcgttaaacataacacccaaatttcctgaggttggatttttcatccctactggtgcatcaatcccagaagccacaaagcggtgctcttggtcttccacagaacgagctccaacggcatggtagctgaccaagtcatccaccaagatcagatttgacggataaagcatctcatctgccgttgtcaaaccagtctctgtaatcacgcggtagtgcaactggcgcacagcctgcaagccattaatcaggcttggagccttagaagtatctggctggtgaactaatcctttatagccgtctccattggtacgaggcttagcagtatacacgcgcatgaccatgaaaatcttatccgctaccttcttttgcaaggcagataaacggcgagcatattccaagaccgcctcttcattatcagaagagcaaggaccaatcaccaagagaatacggtcatcttcccctgaaataatatctgccaattccctgtcacggctttccttgagtctcaaggcttccgcagacaattgggtttcagccttgatgacttccatatcgatttcttgacctttttcaataaatgccatcttattctcctaacgttttgtaaatttctctgacaagagcttctgtgttatcccaacccaggcaagggtctgtgatagacttaccaaatacttctggctcattttgtcgaccatcttccagataagactcaatcataaaaccacgaacgaactgcttaattttttcattccaagcacggttaatcaaggtctggcggacaattcggatctgttcaatatactgcttaccagaattgtcatgattggtatcaatgatgataaaaggattttccaagcccattttctcatactgggcaatggtatcaattaaattgtcataatagtagttgggaatattttttccatactcattaagagcaccacgaagaatagcgtgtgaaagcgggttcccagttgtttctacttcttttcctaagaaaaggaaactttgtttgttttgagcagcataaatcccattaaacatgacattgagatttccagaggttggatttttaaaaccagtagaaaatcctgccccacttgccacaaagcggtgttgctggtcttcaactgaacgggcaccaactgccatgtaagaaatcaaatcatctacaagcggaaggttttcaggataaagcatttcatcagcagttgtcatccctgtttctgtgatgacacgatagtgaagatggcgaacggctttgattccattgataagactaggcgcttctgtcgcgttaggctggtgaatcaagcccttatagccatctccgttggtacggggtttggcagtataaacacgcataaccataaagatacgatctgccacttcttcttgtaggactgccaaacgcttagcgtattcaaggacagcttcttcgttgtcagatgagcatggcccgattaccaagagaattcgctggtcttctccacgtataatggcttctagctcttgatctcgctgtgatttcctctccaaagcctgaccttctaattttgacaaggcacgaacttcttctatatttattttagagctttttgctgtaaataccataactcatctccttataaagcaaacggatacccagtaaaaatttacttttcacaagatatccgcctctaaactatctcattttattgtcttttaccgtgacagtttttaaatttcttaccagaaccacatgggcaaagttcattgcgtccaatctggctcaaatccaaatcttctggcatacttgcttggtgagcagcgatattgcgagtcgctgttgtactgatatgacgttctgcctgtggtctttcttgttcatgaatttgtgctttcatcatcaagcgtgtcacatcaaactcaatcgaaccaatcatatcattaaacatacggaaaccttctgcctgatactcaacaacagggttgttctgagcatagccacgaagtccaaccgcgttacgcaattgatcaagggcatcgatatgatctgtccacttgttatccaccactcgtagaatcaaaactttttggaattctttaactgcttcttcatcgcgtagttttgaaacctgactatcgtaaaccttcaaggaacgttggaaaagctcttccttgatggccttatcagacaagcctgacaagtcttccatcgtaatagaatcttcaggaagcaagttgtacttagcaaagttcaaaattgcctctagtttttcatcttgtttggcacgcgcatgaccatcaacgacacgttcaatcgtgcgtttgatcatagactgaatttcaggtgccaagtcacgatctgcagtgatgacatcgtaacgttgagcatagataatctcacgttgttcacgcatgacatcatcgtattgaaggacttgtttacgggtatcgtagttatttccttcgacacgtttctgagctgcttcaacctgacgcgtcaacatgcgagactcaatggcctcttcagacatgttcaagcgttcaaagattcccttcaagcgttcagaaccaaaacgtttcatcaaatcatcttcaagagataggtagaattgtgactcacctggatctccttgacgacctgaacgtccacgaagctggttatcgatacgacgactttcatgacgttctgtaccaataacacaaagtcctccaagttcacgaacaccttcaccaagcttgatgtcggtaccacgacccgccatgttggttgcgatggtaacggcaccacgttgaccagcattcatgatgatttgggcttctctatagtggtttttggcattcaagacttcgtgaggaacaccagctgcaaccaatttcttagaaatgtagtcactagtttcaaccgctactgtaccaaccaagacaggttgacccttttggtaacgagccttaacgtcttcgacaaccgctttaaacttagattcgatacttgcataaagaaggtctgagtggtcaatacgttgaacaggacggtttgttgggattggaataacacgaatgttgtagatttcacggaattcttcttcctcagtcttacctgtacccgtcataccagacaatttcttgtacatacggaagaggttttggtacgtgattgaggcagatgtcttggtttcatcctggattggcacaccttctttggcttcaatagcttggtgcaatccatcagaataacgacgaccttccatggtacgacctgtaaattggtcgacaatcaagatttcttgctcttcgctcaccacatagtcaatatcgagaagcatgatgtagttggcacgaagggcgttatcgataaagtgagtcaaagccacgttttcgatgtcatagaggttttcaagtttgaagtagctttcagccctgtcaatccctgaatcagacaaaccaatagtcttagactgcacatcgatgatgtagtcatctttgttcaaagattttacatagtggtctgccatgtgatacaactgactggtttcaaccgcattggcacctgatacaatcaaaggtgtacgagcctcgtcaatcaagatagagtcaacctcatcgaccaaggcatagttaagcggacgttgtaccatgttttcggcgcgaacgaccatgttgtcacgaaggtagtcaaatccgatttctgagttagttgagtaagtaatatcacactcataggcttcttttttctccattggagatttggtagccaagttaatccctactgacaaaccaagccaagagtacaattcacccatctcagtcgcgtcacgttctgacaggtattcattaaccgtaactacgtgaacccctttacctgaaagggcattgaggtataccggcatggtcgcagtcaaggttttcccttcccctgtacgcatctctggcacgtcaccatggtgaagaacaatcccccccatgacctgaaccttataagggaagagacctaggacacgtttggcaccttcacggacaaccgcaaatgcttcgtaaagcaatgaatccagtgattctccattttgataacgttccttaaattcaactgtttttgcttttagttggtcgtcagtcaaagcagccatttggtcttcgtatttgaaaaccttgtcagccatcttttccagacgacggatttctcctttatcattttcgataattgtttttaaaatattagccatgtttttccttactttaaattccgaatattttagaatgttcctttaattttagcacaattactgattattttcaaggaagaatccccattttgaaaaggaaaaagaggttagttttcaagctaacctctccgacttttatgactgtttaattgccaaaaatcggcaaaatggcaaatgtgataaataagttaatccaaagagaaagacagcaaatcagtccaaaaacaaagagactgactttcttggacagcaaggccatgagaatggacagaattccaaaagctagcaagattttctgtatgatgaagatgtcaatccttatccccagaagtggtttatcccaagggataaagaagaaagacagccagatcagcagaactaaaccaatataaaccttggaatatcgtgtaataaatgattttagatgtgccataagccatctcctaggattgtatatcctttacatttgtatatgtccattttcgacaactaatacatctgtacaaaggtctgaaatatcttccgatatgtgcgacgtcaggataaccagaccattttcttttttcaggtaagataaaatgacctgtttggttaacctcacactcttctcatccaaagcattcataggttcatcgagaaagagtatagaaggagaggaaataaaggcttgaatcaaggccattttttgctttgttcctaaggataaatgacggtattcaatgtcttcaaattcctgtaaatcatagtattgaatccaataggcaattcttttttccgtaactttagatgaaaaataccttaacagttccaaattttctctcagggataaatgagataaaaactcgactttttcaattaaaattcctgcatcctgaatataatgattttttaccccgtaaactttaccatcttgaagaacttttcctttgtcaagcttaatataaccagcaagtatctttaaaagaaccgtcttgccagatccattatcacctttaagtccataaatttttcctgattgaaacaccaaattcaactgatttaaaataggtcttttcccataaattttctgtccatttataatttcaagtctcatcgtttatcctttcttaaatttctcttccaagcgactaacaatcaacataactaataaacttaagagtactaaatacactgttacaatatgatccatcatccattcttgtcccacaaatgctaaaaaatagagaaaaaaggaaaaaccagcgcccgcactaatcagtgctatcagataagacagtagtaagtacaacatcattaactgagcaagtaaaaagaaaagtgcgactgttttgaaatgaattcctagaggaagtaaaccaagaaaccagacaaacaaatcttgagtaaaaaatttagaaatgacaaccaatcgtttccttgtataatcgaaaaaggagcttgattgatagcgaatcaagtgatggtaatggtctgccaaatcactttcaagtaaaatgacagagagccatcctaccatgaaaagcgaaaggtttaacaatagtttggggatttctaaattcgcttcagaatagtcattataggaaaaaattgaaatcaattctctcttgaaaaagataacagcatcctgcttttgaaccgctgttgacaatagatggtttatcaaaatcatcatcagaactatacgaagtagtaaaacaatctttctatttagcaaaatattgttaaaattcttaaacattatcttcatatttttcaagcaccatgtaagggacaatataaaggatataaggagtaaagagtttcatcaaacttacatccccatagctagcttgcatcaaactcgtcataggaaccatatagtaaggcaaggcactataaagcagcatagaaccaagccaaagaaacatcaaataggtgattgccgaacgagtcacattccccacataatcaactatttgtaaaaaatagattgcattgatgaaaataccgattagtaggacacaagtaaagaacaaatagctttttatctctccatctaggagtctttgtaaaccacttccatcagaaaatagagaattccatccaagaggagaaaaagtcccaaagaaataggttataattgcaattatcagcacagtcactaaatatatcaaacaagggatacttgcaacttgcaaagtcaactttctttttaacccttgataactcacttctcttccaatactcaatcgtaaaactttatttttcagctcaatatattgaaaacctagcaaaacaatgatgattggaataataaatgattgataaaaacctagattgaactggagaatacgaaaatctaatgctgattttaataagtcatttttaattgcttgtccatcgaatttagctagatcgggcgcatgaatatcaaaaaagaaataagtcatcaaaacatcacgataaaccaaagcaagaaaaagcaaagtaagcaagacataaacaaatttatgccttgcaaaagttaagagaggaatcttcataagccacctcctacaaatagaaagtaatataatactcaatgaaaatcaaagagcaaactaggaaactagccgcaagttgctcaaagcactgctttgaggttgtagataagactgacgaagtcagttacatatataatccaaggcgacgttgacgtggtttgaagagattttcgaagagtataaatcaatgccttccgcctttagacttccctagttcccgtctcaagtcaagcatttttttgaaaaagacataggctaaccagtcactagcaaaagcgataagtagtaataatagccaaataccccataacttgatatctgtcaaatttctcaagacgatattgaaaaacagaactgaaaaaactgtccaagcaaggctaaaaagagcatagagggtgatgtaaatccagtaaaaatagtaaaaaattgggaaaaatttactttctctattatccttgtcaatccagctgaaaaagtaaaaacagggtaataagattatcattttaaacaagtgttccatcacaaacctcctcttttaaattattttctttagtttcgttctattaaatgttattaccaatataaaccttggaatagcgtgtaataaatgattttagaggtaccataagccacctcctacaaatagaaaccgatataaatcaatgccttccacccttagacttccctagttcctgtctcaagcgaaacatttctttgaaacaggaataagttaaccaattcataccaatagctagcagaataaaaagaaaccaaatgccccataacttgatatctgtcacatttctcaagacggtattgaaaaacagaactgaaacaactgtccaagcaaggctaaaaagagaatagaaggggatgtaaaaccagtaaaaataataaaaaattggaaaaaacttactatttctgttggccttttcaatccagttatcaaaataaaagtacggtgctaaaagtaagaatttaaacaaatgttccatcaccgacatccccccttcttttgatagcgttttctattattttattatatcaaaaaaatccggaactgtcattccagattctacttttttatttgcgttttcttgcgatgagatgaatcggtgttccctcaaaaacaaaggccttgcggatttgattttccaagaaacgcaggtaagaaaagtgcatgagttcttcttcattgacaaagatgacaaaggttggtggtttggttgccacttgggtcgcatagaaaatcttgagacgttttcctttgtctgtcggtgttgggttgatggcaatggcatccatgatgacatcgttcaagacagctgatggaatacgtgtattttgactttcgctgatttgcttaatcatctcaggaagtttgtggagacgttgcttggttaaagctgatacaaagataatcggtgcgtaaggcaggtattggaactgctcacggatatcttcttcccagtttttcatagtgtggttatctttttcaagcgtatcccacttgttgaccacgataatcatccctttaccagcttcatgggcaaatcctgcgatacgcttgtcgtactcacgaatgccttcttccgcattgatgaccatcaagaccacatctgaacggtcaatagcacgcatggcacgcataacagagtatttctcagtattttcataaaccttaccagacttacgcataccagccgtatcaatcatggtaaactcttgaccatctgtatctgtaaagtgggtatcaatggcatcacgagttgttccagcaacaggactagcaataacacggtcttctcccaagatagcattgatcaagcttgattttccaacgttaggacgaccaatcaagctaaacttaatgacatctggattttcttcctcatattcatttggaagattttctacgatcgcatctagcacatcccctgtaccgattccatggacagatgagataggcaatggttcacccaaaccgagagcatagaaatcatatatatcatttctcatctcagggttgtccaccttgttgactgcgaggataactggtttgtgggtcttataaagcttacgagctacgtattcgtctgcatcagtaattccttccttaccagacacgacaaaaacgataacatctgcttcttccatggcaatttctgcctggtgcttgatttgttccatgaaaggagcatcgacatcatcaattcctcctgtatcaatcatgctaaaagaacgattgagccactcacccgttgcataaatacggtcacgtgtcactccttcgacatcttctacaatggagattcgctcaccagcgatccgattaaatagggttgatttcccaacattgggacgtcctacaatggcaatagttggtagggccataatttctcactttctacaataatttcttctgttcaagattttttctagttgagcttggttcagcttgaccaaactgttctgctaggcgctgactccagcttgtggtcgcacgcgccccagcatagtcagcctgaacacggtcataagcttggattgcctcagttgactgttcttggtattcttcctcaaagacaacattctctagtggcagtctcggtttcatatcatgatgttgatttggcacacccagtgccatcccaaagacagaataggtgtagtcaggtaggttaaagagctctgccacttcttcagacttgtatcgaaccaaaccgataatcacaccaccatagcccaagctttcagctgccaacaaggcgttttgtccagcaagagctgcatcgaccgaactaatcaagagaccttccacaccttggggttggaaggtgtcggtatgaagtcgggctcccttttctgctcggttcaaatctccgacaaagagaaggaaaacagcagactggcgaatggcttcttgaggtaccaattcatacaaggcatctttcttctcttgacttcgtaccacaatcacagagtaggattggaaattcttccaagatgatgccatctgggctgctgtcaaaatctcatttaagtctacttggggaatttcttgctctttaaacctgcgcactgaagtatgagccttcatcaatttaatggtttctgtcatcgacggtttactccttctaaacgagtctcctcagccaaataacggatgcgttccatgacccgtctggcttcccaggtttcgtcatttccatgtttcactttcgcaaaatgcttctccaaatcttcaaagttgaagttggatgtgaaaaaggtcggtaaattttcctgcatccgatattggagaatgacctgcaggatttcgtcacgcacccaaacggttgattgctcggcgccaatatcatctaaaatcaggacctcagacagcttaatctcatccaccaaggtcttaacattgccatcactgatagcatttttgacatcaatgacaaagctaggatagtggaggagagttgatgaaacaccacgtttttctgataaatcatgagctaaggccgccaccatgaaacttttacccacaccaaagtctccatataagtaaagaccttttcgaatagctggatattgctccacgaaggctagtagcttttcaaaaactggtaagcgccccaaatcatccaagtcaacttgagccaaactagctttcttgagactggctggtagattgattaacttgagacggttcttaatagccgcttctttttcagccgcgattagctcaggagtttcttcatatgaaacatctgcataaccatgattcttaaccaaaatcggcttgtagcctttggcaatataatccgtatccccacggagaaacttgtcacgctcggtgatgtactgattaaacttggagatactgcgatttaattcctttggagttaaggattcttgctggataaaggccgcaacatcagggtccttcatgattttctggaccaaatcttgataataaaaacggctgggttgacgtttgagtacgtctccgacactttccatctaatctcctcctttttctaatcgagctaatagttcttgcttcttacgttctagttccagacgagtttcctcgctggtttcattcttatattcaggattactccatttaggaacattggttttttctggggcagtctgattctgtttttgtgtttttgctttctgccctcgatcacgaattcgtaaaacggcctcttctgccgaatgaatcttttgataggcatagtcattggctaccttcatggcatatttctcattgatatttgccgaatccaccttattaaaggtcaataagagaataatattgatgacttcgtccagtaagcccaagccagccatctgttgcaagagttctctttctgtttgggtaatggttcccttgcgtgtttgcttgatttctgctaagaactgcagggcagttttacttttagcttctttgataatggtcgcttccttaagactaaagtcagaggaaactggtttttgagcaattttttcacgcatgcgtttggttgaaataacctgggaaacagctgttgacttggccaattgataggtttcaaaccaagtccatttcttctcctcggcaatagcaaagaggtttaagacatcggactgctcatccgcaaaacgaagtccatctcgagccatcagctggcgaaaatgttccaagtcaaaatcattggccactttcttcttgagaccaaggtcttcttgactgcctagttctgccaattctggaaagacttgattgagtgagacaggtatttcttcaccatcagcactttcaactttcaaatcctccacagctacatcgccaatctttttctctaagagtctgcgataaacaggatgccccaagaagtcttgactagatagaggagcatggagggctagctgataaacatcacccttttgatagagggtcaagagattaaaagcagataagattttcaatgattttatcagtctatccatcccaaagttgagatggttgagaatgcttgaaaaaagatattcctttctaccattatcccaaaaactgattgtataaagataaaggctcagtgcctcctgaccgataatcgggaggtagcactgtaccagagatgaggtatcttgcgacacccgattattctttagataagaaaaacggtcaattggcttcatttatctttcctttttctttttagaggactgggtgatttgttggagcaagctctctaactcactgacatccttaaaactacgatagacactagcaaaacgtacataggtaatctcgtccaattcagccaactcctccatgacgagtgaaccaatgtcctcactttgaatttcattttcatttcgaccacggagtttctgttcgatacgattgactaccatgttgatttcatcacttgacacaggacgtttctgggctgagcggataatcccattaaagattttatctctggagaattgttcccgtgtgccatcttttttaacaaccactaaggttctttcttctactcgttcgtaggttgtaaaacggtgttggcattcgtcgcactcacgtcttctacgaatggtgttcccttcttctgcttggcgactatcgataacacttgacttggtagccccacattttggacaacgcatcctttccctccttatcgttttcttttcattataccattttttaagcgattcccaaaacaattcttctttttgcttgacaagttttttgttttgttgtattatttaattaagacaacaaggtaaaagaaaggagactaagatgtcctggacatttgacaacaaaaaacccatctatttacagattatggagaaaatcaagcttcagattgtttcccatacactggaacccaatcaacaacttccaaccgtgagggagctagctagcgaggctggtgtcaatcccaataccatccaaagagccttatcagaccttgaacgagaaggatttgtctacagcaagcgaacaactggacgatttgtgactaaggataaggagctaatcgcccagtcacgcaaacaattatcagaagaagaattggaacacttcgtttcctccatgacccattttggctatgaaaaagaagaactaccaggcgtagtcagtgattatattaaaggagtttaagcctatgtcattactagtatttgaaaatgtatccaaatcatatggagcaacaccagcccttgaaaatgtttctcttgacattccagctggaaaaattgtcggccttcttgggccaaacggctcaggaaaaacaaccctgattaaactaattaatggcctcttacaaccagatcaaggacgtgtcctcatcaacgacatggacccaagcccagcaaccaaggccgttgtagcttatttgcctgatacgacctatctcaatgagcaaatgaaggtcaaagaagccctaacctacttcaagaccttctataaagatttcaatcttgaacgcgcccatcatctacttgcagacctgggcattgatgaaaatagtcgtctcaagaaactatcaaaagaaaacaaagaaaaggttcaactgattttggttatgagccgtgatgctcgtctctatgttttggacgaacccattggtggggtggatccagcagcccgtgcttatatcctcaataccattatcaacaactactcaccaacttctaccgttttgatttctacccacttgatttctgatatcgagccaatcttggatgaaattgtcttcctaaaagacggaaaagtcgtccgtcaaggaaatgtagatgatattcgctacgagtcaggtgaatccattgaccaactcttccgtcagaatttaaggcctaagcaaaggagattatttatgttttggaatttagttcgctacgaatttaaaaatgttaacaagtggtatttagccctctacgcagccgtgctagtcctttctgccctcatcggaatacagacacaaggctttaaaaatctaccttaccaagaaagtcaggctactatgctactttttctagctacagtctttggtggcttgatgcttacacttgggatttcaaccattttcttgattattaaacgcttcaaaggtagtgtctacgaccgacaaggctatctgactttgaccttgccagtttctgaacaccatatcatcacagccaaactaatcggtgcctttatctggtcattgattagcaccgctgtattggctctaagtgctgttattattctggctttaacagctccagaatggattcctctttcttatgtgattacatttgtagaaacacatctccctcagatctttcttacaggtatatccttcctactaaatactatttcaggaatcctctgcatctacctggctatttccattggacagcttttcaatgaataccgtacagcactcgctgttgcagtctacattggtatccaaatcgtcattggatttattgaacttttcttcaatcttagttctaatttctatgtcaattcactggtaggactcaatgaccatttctatatgggagcaggtatagccattgttgaagaactcatattcatagctatcttttatctcggaacctactacatcttgagaaataaggttaatttgctttaaataatttttacctagatatgtaacatactcatagaacaaaagagaccaggcaaaaagtctttaaaattagaaaacgcatagtatcaggtgttgaatatgtactgccccccaaaagttagattttttctgtctaacttttgggggcagttcataagaaccttggtaatatgcgttttttgtgagctgacttatttcctttcactatatcgcaaaatgaaataagaacggaacgatgggattttggaattcaaatcaatttataagaatgttttagaagtaatattatcctattccagattcagttcactatacaattgagttttcaagcaacctgtttacataatgtgtacataattaggttcgtgattccacccttttcacctttaaaaacctcgctttcgcaaggctcttctatttataagataaggcacgtttaaaggttttccaaatccctaaatcatccgtttgaagaacgagactagcatacatgcgtccgataaatcctgttgctaccaccgcaaaaatcactgtaatagcaagtgaaatccatgcttctgctccccccgcatagtcattaatcgttcgaaacggcataaagaaggtcgaaataaagggaatataagaaccaatcttcaagaggagattgtcaccagctgcacctagagctgtcactccaaaaaaaccacccataatcaaaatcatcaaaggcgacaaggctttccctgagtcctcaggacgagaaaccatagatcctaggaaggctgccaagactacgtacatgaaaagactgatcaaaataaagagcaaggtattcagtgagatagcatctcccaagtgatccaaaataccagactgagccaagaatggcaaatctttaaagagcaaaacggcagccagaccacctacaacatagatcccaatatgcgttaaaatcactagaaacagagccatcatccgcgcatagaaatagtgacttgcccttatgctagaaaaaacgacttccataattttggtgcctttttcactggcaacttcctgagctgttacacccgcataggtaatcagaatcatataaagaaagaatcctaaggcacctgctgcaattgtttgaataaactttttattttccttggcttcatcaatcttttctgtgaattgaattgtctgcgctaagcgtttttcctgctcttgagacaaggaagcagttgaacgattaagctgattttgcagttcattgagtgtacctgtaacctcaaatttaattccattttcaagcgatgtttcgccatgataaactgcctttagaacactatcttcttgatcaatggtcaaataaccttttaatttttcttctttaattgcttctttggcacttgcttcgtctttatagtcgaagttaacaccatttacattcttcagtccttctgctacagatggcactgttgtcactactgccactttattatttttagccatagaagaaccttggagatgcccaattcctacagagattcctaaaaagaggaacggcgaaatcaccataaagaagaaactccatgactcgacatgtcgaagataggtttccttgattacaacccacatatttctcatacttccactcctgattctagtttaaagatttcatcgatagttggcgcttgttggtcaaatgttgcgatatattgaccttgagtcaagattgagaagagttcccttccagcgctctcatcctccaaaatcaatttccaactgccttgtttggtcaagctcacctgtttgacatgaggaagattttccaattcttccttgcttcgttcacttgaaacaaagagacgcgttttcccgtattgattgcggacatcctgaactggtccgtgcaagaccacacggccatctcggatcatcagaatatcgtcacaaagttcctcaacattggtcatgacatggtcagaaaagataatggttgctccgcgctctttttcctgaaaaatgacttgtttgagcaattctgtattaactgggtccaatccactaaaaggctcatccaagataatcaggtctggttcatgaatcagagtaataatgagctgaatcttctgctgatttccttttgacagactcttgattttatctgtcagctttcctttcacttccaacctcttcatccattgagggagtttttctttgacttctttggcatccatgccttttagagtcgccaagtagcgaacttgttcaagaactgtcaatttaggcatgagatgcgttcttcaggcagataaccaatccgagcataggtctcctgacgaatatcctgaccatccagaccgatttctccctgatattctaggaatttcaaaatactatggaaaatcgttgtttttccagcaccattttttccgactagtcccaaaatacgacctggtcgcgcttgaaagtcaataccaaacaaaacttgcttggatccaaaacttttctctagacttcttacttctagcatctttcacctccgaaatttcttgcactcattatactcctttttgatagcctttacaatgttttttgtccatttttagaagactattgctgtgtaaaatatggcctggagcacttttatactcaatgaaaatcaaagagcaaactaggaagctagccgtagactgctcaaagtacagctttgaggttgcagataaaactgacgaagtcgactcaaaacactgttttgaggttgtggatagaactgacgaagtcgataactatatctacggcaaggcgaagctgacgtggtttgaagagattttcgaagagtattagtgataaatccattatacagcagcaaacttaatttataccttccgctcctcaactgtctatttttaatcctgaattgttatttgagtaactcctttttcctcgtaaagttttcttcctctaaaacttctggaaaaaggctaatagtttcagacaacatttttataagaaacaagttcatctgtcatttcaagaaggagtaatcctttatctactaatggacggaacagaattcaaccgcttgtccgatatgttttctaaggattatatagtaaaatgaaataagaacaggacaaattgatcaggacagtcaaattgatttctaacaatgttttagaagtagatgtatactattctagtttcaatctgctatatctattatgcacacccctataggatctaatgaaaatcacaacaggctcattcatagatggttacctaagcctaagggaactaagaaaacgactaccaaggaagtcgcattcatcgaaaagtagattaacaactatcctaaaaaatgcttgaactacaagtcccccagagaagacttctggatgactaacttgaacttgaaatttagcaataattaattcactatctaactatatttagtaattatttcagaactgattaatattaaaattaactaacaattcaaaggattcatactagccataaattacgtccatcagagagagactcttactacttttagattttagtctttctagcttcagaatacatctaaactttagggaaaatgactattcgaaagcgcgaatgcctcaaaattatctcagataagctattcgaaacttagaatgcttttaaatttatggaattgcgattattcgaaacctagaatgcatataacctttagttgacagacctattctaagtctcgaagggctatttactttctattccttatcaaaaaagactcattccccctttctcctccaaaatatggtatagtagaaatatactatctatgaggagtttacatgtcacaggataaacaaatgaaagctgtttctccccttctgcagcgagttatcaatatctcatcgattgtcggtggggttgggagtttgattttctgtatttgggcttatcaggctgggattttacaatccaaggaaaccctctctgcctttatccagcaggcaggcatctggggtccacctctctttatctttttacagattttacagactgtcgtccctatcattccaggggccttgacctcggtggctggggtctttatctacgggcacatcatcgggactatctacaactatatcggcatcgtgattggctgtgccattatcttttatctagtgcgcctatacggagctgcctttgtccagtctgtcgtcagcaagcgcacctacgacaagtacatcgactggctagataagggcaatcgttttgaccgcttctttatttttatgatgatttggcccattagcccagctgactttctctgtatgctggctgccctgaccaagatgagcttcaagcgctacatgaccatcatcattctgaccaaaccctttaccctcgtggtttatacctacggtctgacctatattattgactttttctggcaaatgctttgacacgtaaaaaatccgtttggtttcccaagtggatttttaaagcgtagattaactatagcttgatactaaatatactttggtatggaaatcatgcatatttttcgatagtgaggcgaggacttacctagcctttccgccgtgatagaaacacctgaaatctaatggtttcaggtattcggaaactttgagcctagtgtctcaaagtttaggtatggaattttgaagaaagtcgctaccgtccgtaatcacttaaggaaaggctcaaaaatattgttttcaaccacaaaatccgtttggtttcccaagcggattttgtgctttattttgaaacttcttttgcaagaacaaagttcccaagtgtggcagaaccatttcctgcgactgctggcgtcacgatatagtcacgcacatctggtactggtaggtaaccattaagaagagatgtaaatttctcacggacacggtccagcatatgttgttgagccatgacccctccaccaaagacaatcacgtctgggcggaaagtcactgtcgcattaaccgcagcttgagcgatatagtaggcttgaacatcccaaacagggttgttgagttcaatagtttccccacgtacacctgtacgagcttccaaacttggaccagctgcataaccttctagacatcccttatggaaaggacaaacacccttaaactctttttcaatatccattgggtgtctagcaacataataatgacccatttcagggtgacccacaccaccgataaactcaccacgttggatgacgcctgcaccgatacctgtaccgattgtgtagtaaaccaagttttcgatacgaccaccagcattgttacgggcaaccatttcaccgtaagcagagctgtttacgtctgttgtgaagtacattggcacgtttagggcgcgacgaagggcaccaagcaagtctacatttgcccagtttggttttggagtcgtcgtgataaagccataagtttttgagtttttgtcaatatcaatcggcccaaatgaaccaactgcaagaccagcaaggttatcgaattttgagaagaactcaatggttttatcgattgtttcgattggagttgttgttggaaattgtgttttttctacaacgttaaagttttcatcaccgacagcacagacaaactttgtaccgcccgcttccaagcttccatataattttgtcatgataaacctcttgtttttattttctttattatagcatacttcgaaagtctaaatgtctctattttttagattttcctctgtaaatcttactatctaataaaaacgaacaaacatgtcatttgttcgttttcacattagagaggattgattagattttcacttcgatcacagcatcccccttagcaactgaacctgttgcgactggagctactgaagcgtagtcacctgtatttgtaacgataaccattgttgtatcatcaagtccagctgcagcgattttgtttgagtcaaatgttccaagaacatcgccagctttcaccttattaccttgagcaacttttgtttcaaaaccgtcaccgttcatagatacagtatcaataccaacatgaatcaaaacttcagcaccatttcttgttttcaaaccaaaagcgtgccctgttggaaaggcaattgaaacttcagcatcagctggtgcatagaccacgccttggcttggtttcacaacgataccttgtcccatagctccacttgagaagactgggtcattgacatcagcaagagcgacaacatcaccgacgataggagttacaagtgtttcattttgaagagctgctggcgcaacttcttctttttcttcagccacttcagctcgttttgcagctgcagttgcgtctacttcatcttcgtaaccaaacatgtaagtaagagcaaaaccaagggcaaatgatacagctaccataagaaggtattgtggaagttgtccgttaccaacataaagcattgtaccagggatgatggtgataccattaccagtaccagcaagtccaaggatagaagccaatccaccaccgattgcaccagcaatcaatgaaaggaagaatggtttacggaagcgcaagttcaccccgaagatagcaggctctgtaatacctaggaaggcagaaagagcagccgggaaagcaagtgttttcagttttggattttttgttttaacaccaaccgcaacagtagcagcaccttgagctgtcatagcagctgtgatgatagcgttgaatgggttagcatggtcagcagcaagtaattgcacttcaagcaagttgaagatgtggtgcacacctgacacgacgatcaattggtgaaccccaccaatcaagaaaccaccaagaccaaatggcatgctaagaatcgcttttgtagcaataaggatgtagttttcaacaacgtggaaaactggtccaatgacaaagagtccaaggatagacatgaccaaaagtgtcacgaatggtgttaccaagaggtcaatgacatctggaacaacttgcggacagctttttcaaatttagctccgacaaccccgatgatgaaggctggaagaacggaaccttgcaaaccaacaacagggatgaaaccaaagaagttcatcgctgttacttcaccaccttgagcaactgcccaagcgtttggaagtgagccagagacaagcatcataccaagaacgataccaacggcaggatttccaccaaatacacggaaggttgaccacacaaccaaacctggcaagatgatgaaggctgtatctgtcaagatttgtgtgtaagttgcaaagtcacctggaagtggcatttcaagagcgttgaaaagaccacgcacacccatgaagagacctgtcgctacgataactgggatgattggaacgaaaacatcaccaaaagtacggatagcacgttggaaccagttcccttgtttagcaacttctgctttcatgtcatccttagatgatgttggtaatccaagtacaacaacttcatcgtacattttgttaactgtacctgtaccaaagataatttggtattgccctgagttaaagaaagcaccttgaactttttccaagttctcaatcacttctttattgattttctcttcatctttgaccatgacacgtagacgagtcgcacagtgggcaacactattgacattttcacgtccgcccaaggcatcgatgactttttttgcaatttcctgattgttcatttgcaaaaatctccttatataacattttgttcttgtttgaaagcgattttattcgcccttacgactattattttatcatgttttaaaaatatgtcaagcgttttgcagaaaaaaattctatccacttagtgggcaagctttagattgattgtttttgactgtttcatcaggaattccttgaaaaataagtttgaaaccttggttaaaaagtattttatttcattatctttcacattttcgtaaaaatttgattgatttcctgtatttattttatgataatcctttgacagtttttcctcttttttaacataaaaggcttgcattttttatcgaaaacagttactattaaaagtgataagatttttggaggaatgaatggaatggacaactgagcgtcgttacagactttatcaagattggacgcaagaagaaattcaacatataaaggaaaatatggcacaatctccatggcatactcattaccatgttgagccaaaaacaggacttctcaacgacccaaatggcttttcttactttgatggcaagtggatcctcttttaccagaattttccttttggtgcagcccacggtttaaaatcttgggcacagctagaaagtgatgatttgattcactttaaagaaactggaatcaaagttttaccagatactccattagatagccacggtgcctactctggttctgccatgcaatttggcgataacttattcctattttatacaggaaatgttcgcgataaaaactggatccgtcacccataccagatcggtgctttgatggacaaggagggtaagattacaaagattgacaagatcttgattgaccagccagcagactctactgaccacttccgcgatccacaaatttttaactttcagggtcaatattatgccattgtcggcggacaagacttggagaaaaaaggtttcgttcgtctctacaaggctgtcaataacgactacacaaactggcaagcagttggcgaccttgactttgctaacgaccgtactgcctacatgatggaatgtcctaatttggtctttgtagaggaacaacctgtccttctctactgtccacaaggattggataagaaagttctagactacgataatatctttccaaatatgtataagatcggggcttcctttgaccctaaaaatgccaaaatggtagatgtgtctcaacttcaaaacatggattacggtttcgaagcctatgcaactcaagccttcaacgctcctgatgggcgtgctctagcagttagctggcttggtttgccagatgtttcttacccatctgaccgttttgaccaccaaggaaccttctctttggtcaaggaactcactatcaaagacgacaagctctaccagtatccagtcgctgctattaaggaccttcgtgcttctgaagaagccttctcaaaccgttcccaaaccaagaacacttacgaacttgaactcaacttggaagctaatagccagagcgagattgtcttacttgctgataaagaaggtaagggactttcaatcaactttgaccttgtaaacggtcaagtaacagtggatcgtagccaggctggagaacagtatgcccaagaatttgggacaactcgttcttgccctatcgagaatcaggctactactgctacaatcttcatcgataactctgtctttgaaattttcatcaataaaggagaaaaagtattttctggtcgtgtcttcccacatgcggaccaaaatggtatcctgattaaatctggaaacccaactggaacttactatgaattagattatggtcgcaaaactaactgatgtcgccaaacttgcaggcgtcagtcctactaccgtttctcgggttatcaataaaaaagggtatctatctgagaaaaccatccaaaaagtcaatgaagccatgcgagaattgggctataaacccaacaacctggctcgtagtctgcaaggaaaatcagctaagttaatcggcttgattttccccaatatttccaatgttttctatgcagaattgattgataaattggaacaccaactcttcaaaaatggttacaagaccatcatctgcaacagtgaacatgattctgagaaggaacgcgaatacatcgaaatgttggaagccaatcaggtggacggcatcatttctggtagtcacaacctaggaatcgaagactacaatcgtgtgacagcgccgattatttcctttgaccgaaacctatcgccagacatccctgtcgtctcctctgacaactatgctggtggggttcttgctgcccaaaccttggtcaagacaggtgcccagtctatcatcatgattacagggaatgacaattctaattcgccaaccggactgcgccacgctggttttgcatccgtactcccaaaagctcctattatcaatgtttccagtgacttttctcccgtcagaaaagaaatggaaatcaagaatatcttgacccgggaaaaaccagatgccatttttgcttcggatgatttgacagctattctggtcattaaaatcgctcaagaattgggcatttctgtcccaaaagagctcaaggtcatcggctatgatgggacctactttatcgaaaattactaccctcaattggctactatcaagcaacctttggaagagattgcttgtctcactattgatcttctcttgcaaaagattgaaggcaaggaagtcgccacaactggttacttcttaccagttacgctattaccaggaaaaagtatttaaacacaagaaaactcagaccgattcgtctgagtttttatgatcttaaattttcgagatagcgctgggctgtctctaggttaaaggttttatctgagatgaggcgctctactaggggagcaacttcagattcactagccccagctaggagagctagggatttggcctgtagtttcatgtggccttgctggatgcccgtacttaccaaggctttgagggctgcaaaattttgagcaagaccgatggacacgataatctgggctaattctctggcagaaggatttcctagtagatcatgactgagaactacacgtgggttgaggccgatagagccacccttagtcgctacaggcatgggcagggtcatctcaccgaccaattcttctctttcaaggtccagcgtccagcagctaagaccttgatagcgtccatctcgactggcaaaggcatgggccccagcttcgatggcacgccagtcattaccagtggcaatcaaaatcgcatcaataccattaaaaattcctttattatgagtagcagctcggtaaggatcagcctgcgcaaactgactagccaacgcaattttctccgcaatctctcgtccttgatccttttggcggctcaagtagcgaaaggcgatgcgacagcttgcagtcaccagagaatcggtcgcgtagttggacaggattcccatgagactctgtccctgactgagttcttctaagactggtttcaaggcttccagcatggtgttgagcatattggcacccatggcttcctgggtatcgacatgaatataaacaacgagaaagtctggttcgccttttatctgctcgacatgcagatcacgcgccccacctccacgtttaacgatagaaggataggcttgattggcaagctccaagagctccgctttcttgctggcaatcttctcttgcgctagtttaggattagcaacttgataaagggctacctgcccaatcatctgtcgctgatggacttgtgcagtaaaaccacctgcacgcttgatgattttgctggcatagctggccgccgcaaccacagagggttcttctgtcacatagggaacggtgtattcctgaccgttgacaagtacctccggaaccagtgaataaggcagagaaaaagttcccactacattctcactcagctggtctgccacagtcacgctcatctgttcatccttctccagactagcttgtctctcaggactaaggagcgcctgagcttttaacagctcgaggcgctcttggtatgattttttagaaaatccattccaacttatcttcattatttttcaaccttgctataacggcgttggtggtcgagaatttcaaccaaggcaaaatcttgattttcatagccagcaaactgggcagagttagtttcatccaagtttacttcctcaaaaaagaccttttcatagtctgcaacggatagggcagttcgttggttgagcttgttcaaacggtctttatccaaataagcttcatatccttcaaccaattcaccactgaagaactcagccacagctccacttccgtaactataaagggcgattttatccccagctttcaagctatctgtattttccaagagagacaaaagtccaaggaaaagtgaacctgtgtagatattccccaccttttgactgtagagaatagactggtcaaaatgcttttgtaagaggtcttttttctcttgaggcaggctcttatccatgatttttttcaagccttttagcgctaatttaggataaggcaagtggaaacaaacagccgcaaaatcatccaaagtaagctggtagcgtttttgatattcaagccaagtcgttttcaaactatccaagtattgttgggtagaatagacaccatttacataaggagttgtcgagtaatttggtcgccagaaatccatgatgtcacgggtctgagctacattgtcattattaaaggccatcatgcgtggattttgtgtaatcaacatagctacacttccagcaccttgagttggttctcctggagtttcaataccgtatttggcaatatcactggcaatgaccaagaccttggactccggagaattttccacatgcaatttggcataatggagggcagcagtcgctccgtagcaggcttctttaatctcgaaactacgagcaaagggctggatgcccagcaagccatgcacaaagacggccgcagccttactctggtcaattcctgactcggtcgccacaatgaccatgtcaacttcttgtctttcttgctcagttaaaatagagtcactagcactggccgccaaggtcacgatatcctcagttaggggcgcaatactcaattccttgagtaagagtcctttacttaatttttcagggtcaattcccctcgcttctgctaagtcttgtaatttcaagacatattgactggtcgcaaaaccaatcttatcaataccgattgtcatatttacctctgttttatcattcatgtaaaaaatcgttctatactattttatcacaaatggcagtaaaagagagaaaaaagacttgattcaccaaatcaagcctcttattggtcatcattttaaagaatgattagttgctagagagttcaccgatataagtagctttataagctccattcacagttatcagctcctggaggatcaaatttcctgagtaagtccttcccatctcatctacaaatttttgataaaactgactggtcggaatttctctgacatccttatcaaatgtcttatcaagtgttttactaaccttctcagcaatcaattgatgctcttgccatccactttgaaactctgagcccgaactagaaaccatgactgggataaacaacaaggtcagtagatttacagacaataaggaaagtagtagacttcctgcaaaactagaatcctagttcatgattgataataccagcaatcaaattcattcgtaatccgaagcgtttacgatgatttcgataggttgttgaaaacattttaaacgtttttactttggcaaagatgttctcaaccttgcttctctccttagatagcgcatggttacaggctttatcttcagctgttagcggcttgagtttgctggatttacgtggagtttgtgcttgaggatatatcttcatgagcccttgataatcactgtcagccaagattttaccagcttgtccgatatttctgcaactcattttgaacaacttcatatcatgactatagttcacagcgatatccaaagaaacaattctcccttgacttgtgacaatcgcttgagccttcatagcgtgaaatttctttttaccagaatcattcgctaattgttttttagggcgattgatttttacttccgtcacatcaatcattatcgtgtcctcaaagctgagaggagttcttgaaatcgtaacaccactttgaacaagagttacttcaacccattggctccgacggattaagttgctttcgtggataccaaaatcagccgcaatttcttcataagtgcggtattctcgcacatatagaaagcgttatcaatttatttatctcatttttcagaaaattcttttatttctgtaaagtctacgatactcgatgtgtttttatataatgatagagtctgagaatcactgttccgctagccattccaatagagattaccaaagccaacatgacaaccaaggtcgcacttgccagtgctttattatagtcccctgtcacaaaaaaggcagttgttcggtaggagagataacctggaaccagcggtgccaaaatggccaagataaagaccacagcaggtgtcttataaagaatacttaaaatctggctgacacaagaaccaataatggctgcaatgaaggtagctacaatgacattggtcggttccttgagcaagagatagattagccagacagtcatgcccaaaatccctccaggtaagagcatagaccgttgcacattgagtacgattaaaaaagtgataatggcaagaaaacttgctactgcttgtaataaaaaggttgttagtgtcatattagttcatcaataccaaggcgacagaagttcctgcccctaaagcgagggtaatgagcagggattcaaacatcttactcataccagagtttatgtggttggtcataatatcacggaccgcattggtcaaggcaatacctggtacaaacggcatgaccgcaccagctataatcaaatctgccgttgaaggaaaacctgtgtagcgagcccaaaactgggcaattatcccaaagacaaaggctccagcaaaggctgtcacaaagggaattcggataaatttttccacatagagggaaaaggcaaaaccaaataaggtcgccactcctgccccaagtgcgtcgtagatatttccgctaaacataactgaaaagaaaggagcactaaaggtcgcagccagagttacctgcaacttagtatagggaaggggtttggcttgcaaggccgtcaattgcttaaaggctgtttctaagtcaatctgccccccaactagctgacgagaaatctggttcacatcgcagactttttcgatgttataagaagaggaggtcacgcgcttcatgcgcgaaatattggtattttcaatagagaaaaagatagcggcaggcatggcaaggacattgcaatccacaatcccctgcgaatgcgcgattcgaatcatggtatcttctacacgatggatttctgagccacttttaaggagaatagtccccgctagcataatcacatcaatgacggcatttaattcttttgattcttccatgctttcctccttttatcaactccctctattctatcacaaatccggactcaaaaaaaatctttgccatgaaatcatgacaaagattgattactcattttgattatccatctgcttttaaggagtagctgaagttgttttaggtttgtagattgaaatcttgactctagtcttattgaggtctaccttttcacctgctctaggactttgttcaacaaccatgccttctgcactacctgcaggcgctgtcgtcacttctacaacttctatattagcttccttaatcccaacaatttgaatcaaattgttcttagtaaactccaagctagaaccaatgtaactcggcatggcaacacttgtaacttttttagctactgtcaagacaatttgagtaggtttactcacatcataagtcgttccggcacctggactttgtttcataatcgttcctggttcgctttcgctggactcttcttcctctatcttaatcaaattctcaggaaccttcttctgcttgagttctgagattacttctgtagagttccgtccaatatagttccctaattgaatcgtcgtagcttttttagctactgtcaaaacaatttgagttgccttgctcaagtcataggtcgtaccttctggtagactttgcttcaggaccgttccagcctcactctcattcgactcttcttcctcaattttaatcaaattatctggaacttttttctcttttaattccgcaatgacatcagaggatttccgaccgacataattactaatttggaaagattgcttgcctgatgagacaaccaaattgattttcgttccttcttttcgaccagttccagcgccaggatctgtacggataatccgcccttcttccaccttttcactagcctctgtcttctcctcaccaatctcaaaattggcttttttgagcgttgccttggcctctgcaactgtctgacctgccacatctggaatggcaatggttgcaggagttctggatagtatccaaataagagaagctgccaccaatacaaggctggccaacaaaatcaggtaacgcatcttaaatctatgttttttcggtgcttgtggttggtaagtttcctctgtcacagcctggcttgggtttttgattgatttgtgttctgtttgcgcttgaaccttaggaatagatgtcaaggtactctgagaaaccttcggcaaggtcttggtatctgccttgctcgtttcatcaaagattaacttactttcatttctacgattgtaggacaagctactagacaagtccacatacatctctgaaaccgagcggtagcgattggtcaactttttagcagttgccttgataataacattttctaaagcctgaggtacagatggattttctgcaataacggacggcaggggtttctggaaatgctggagggcaatggtcaccgcgctatccccgtcataagggatatggcctgtcagcatctcatagaaaataatccccatggcatagatatcactctgcacagtcgccttcgaaccacgcgcctgctctggtgacaagtaatgaactgagcccaacatcgagttagtctgggtcagacttgtctctgcaaaggctacagcaatcccaaagtctgtgaccttggcagtcccatctggtgtcaagaggatattttgaggtttcaagtccctgtgaacaattcctcgagtatgggccaagcgcatagccaagagaatttgtcccatgatacggactgcttcttcattagaaagaggataatgttccttgatatagcgtttgaggtccagtccagccacatactccatagctaggtactgttgaccgtcttcctcgccaatatctgttatccgaacgatatgaggatggtctagatctgccatagctctcgcttcacgctgaaaacgagctacagctatcgggtccgtctggtagttggtcctcagaaccttcactgccacttcttccccatctaagattaagtctttggctaggtagacatccgccatacctcctcgaccaatctgtttgacaatccgatagcgtccggcaaaaatcttgccgatttggatcattctgcatcctcctcgttcatagaaacaagggcaaccgtaatgttgtctaaacctcctgcattgttagcaaaacgaacaagtgtctccgttttatctgctaaaggaatatcactggttacaatatcacgaatctcactgcctgaaatcatgttggtcaagccgtcactattgagcaagagatagtcacctgactcaaggataactgtcccaaaatcaggctgaatttcatctttttgcccaatagactgggtgataatatttttttgcggatgagcttctgcctcttctggtgtcaattgaccagccttgagcaattcattaaccaaggaatgatcgctcgtcaactgatggtattcttctccacgaatcaagccgatacgcgaatcaccaatatgagcatagatagcctgattatcaataatagcaaggacttccaaagtagttcccatgcctctgtaagcttcatcctgaccaagctggtgaatcttttgattttcaatttctaggtaatgggcgaaccattcacgcacttcattgactgtatcgatctgggtatcaacccaagctacacccaggtctgtgaccgccatttcactagcgatattccctgcgcgatgacctcccatcccatcagctaaaataatcatggtacgtccagctctattgacatagtggttgacatagtcttggttatttgttcgtttctgaccaacatctgttaataatgaaatttccatgtgtcagttccttcctaatccgatatcttgcgaaattgactgatgaagaatccatcacttccatacaattcaggtgtaatgaggatacagccgtctttcatgatatccttacattcatgttctagttttacctgctcgaactcgggatgactctctaaaaaggccttaacgacttgaaaattctcctctgagacgatagtgcaggtgctataagttattataccacctttgcctagtatttgacaaacactacctaatatttctaactgaatttcctgcaaggacgcgaaatctgccgtttctttattgtatttgatatctggttttcggcgcaaaagaccgattcctgaacaaggagcatccaccaaaatcttatcaaaggaatcctggtcaaaaaactcatgcacctttctggcatccaatttttgagtttgaacccgatcttcaactcccagacgttgggcattttcttgaattaaatccaacttgtggtcgtacaagtccagagcagtaacctgacctgtcgtaagataagaggctatatgggctgttttcccacctggagccgcacaggcatcaagcactcgctcatcaccttgtaaatcaagcgtcggagcaaccagctgactggactcatcttggatggtaatggctccatccgcaaacaaattatgccctgcaaaatgcccctgctccttaaccagaccagtggttgctaaaagggaattattcgcctccaacaaggcttggatttcctcttttcgacttaggtctgttacacgaatactggctttgtttcgcactaacaggctttcaaagatggcttttgctctctcctctccgtattcttccttgagtttggcaactagccaaactgggagagaataggcaatggagtcacgcttgttttttcgcttgatgctagcaatatctggccagccttcacgcaagatacggcgaaggacagcgttgaccaatttttcactgccttttttacggagtttggccaattccactgcttcattaaccacagcatgatctggaatcttgtccaaatagcggagttggtaggcactcatgagaagaaggacatagagccagctgtctaactggtctctgtcttcgataaagtgggataggtaccattccagagtcagtttacgggctaccgttccatagaccagctcggtcactaagcccttgtctgctgccaaaagttgacttccctttagatgcttatttaaggcgatatttgaatatgcttggttcacaaaaacatcctctagcactgctagagctaaacttctagccgtttctactttagtcaccaaatcgttctcctacagtcaatgtacgtccaactccgttgaggaaggaagcaatgtccatcttaggcttaccagctggctgcacttgtttgagggatagagccccttcagccgttgcgacaatcaattctttcttgccgatagagagaatctcacctggatttccctgaccttctactggtagggcttcataaatcttaaagcggtcgcccttaaggaaagtatgggcaacaggccaggggttcattccacgaatttggttaaagagttgacgattggttttgttccagtccagtttttcttcctctggctttatatttggagagaaggtaacctgactcgtatcctgcggttcaggtttgatatcaccagcaatataggcaggcagagtgtccaaaagcaaatcacgaccaactagcgccaatttttcaaacaaggtgccaacattgtcctcatctgtgatcggaatgctgcgacgagaaatcatatctcctgcatccatttccttaaccatttccatgatggtcacaccagcttcctcatccccttgaatcaaggcataatggataggcgcaccaccacggtgtctaggaaggagggaggcatgaacgttgacagcaaagtccatgctatcaaggagtttgcttgggagaaactgcccaaaagcagcagtcacaattccatctgctcctagcttcataagatcttccatctctggacttccagataatttttcaggttggtagatagatagtcctgcttccttggcagcctgcttgactggggtttcttggataacttttttacgaccaacagcacggtctggctgggtcacaacggctagaatttcgtaacggtcatctgtcaaaagtccttttaagactgttgctgaaaagtcgggggtccccataaagattagttttgtcatatcttctccttcttataaaaattgctgcggctcatggtcaatgctgagacggagctcactattttcccgttcttgagtcaaggctaaaacctggttgagggtcgaccccagctcatcttctaaacggtatttaattaaaatctggtaatgatagaggttgtgggtacgggcaatcggttttggcgttggccccagaatgggactggtctctgacaagcctgaccgcaaaatgttcatgacttcataggcacgtttgaaaacctcttcttctttcttgtgagaaagggtaataccaatcgtgaaatagtaaggtggatagccgagttgtcgtctgattcccatttcataggcataaaagccttcgtaatcttgatccttggcaaatcgaatagcatagtgctgcggattgtaggactgtatcaagacttgacctgccttttcagcccgacctgatcgacctgccacctgagtcaagagctggaaggttctctcagaagaacggaaatcaggcagattcaaggccgtatccgcatttagaactccgactagggtaacattgggaaaatccaaaccctttgcaatcatctgagtaccaagtaaaatatccgcttcccctcgcccaaactggtcaagcaaggcttggtgactgcctttctttcgagtcgtatccacatccatcctcagaatgcgagcttggggaaagagttctgctagctcatcataagccttctgagttcccgtcccatagtaacgaatactgcggctcttacagttaggacagacctgaggaatatccttcgagaaaccacaataatggcagttcatagtcttggtatccatatgcaaggtcagagaaatatcgcagttgggacaagtatccaccgtcccacactcccgacacatgacaaagctagaataaccacggcgattgagcatgagaaccacctgctcttttttaaccagacggtcttggatagcctctagcaaaggaggcgtaaagtttgacgtctcattttgtccgatatagtctcgaaagtcaatcacttgaacctcagggattgtagccaaaggattggcacgttgggttagacgtaagtgttgatagacgcctttgccagcacgtgcccggctctctaagctcggcgttgcagatccaagtaccagagttgcttgattatactgagcccgtaaaatagctacctctctggcatggtaacggggattgctgtcctgcttataagccgcttcatgctcttcatcaataatcatgacacccagatttttcagaggagcaaagatagcagatctggcaccaacaacaacttgggcatcgccacgctccaccttgcgccattcatcatacttttcaccattggataatcctgagtgaagaatggctaccttgtccccaaaacgtgctataaaacgctcggtcatctgaggagtcaaggaaatctcaggtaccagcaaaatagctgtcttgcccttatccagggcaccttggataatctgcaagtaaacctcggtcttcccacttcctgtaatcccttgaagtagaaagggaggttgagaactgccaatagaactcacaaccgcatcacgcgcctgtctttgttctggatttaactccaaaggtctacttgcttcaattccttcaaaataagcagccgagcgttgaacttccttttggactatggtaacagcaccttgatccacaaagaagttgacttgctctcgcgagtaggactctaacaagctagccaaggaagcgctctctggatgagacagcagataatctctcagttccaactttttcttggcacgtgtagaaatctcaacaccttctaattgagcatggtcaacctcataccaagactgggtcttgaccttcttttgatcgactgcctgatattccagaccaagcaggccttttctagtcaaacgcatcatttcagcttgcttggcaaggtctagtgaagaaaaggctagcgaatcttctgaaccaaacaggcgcactcgttcttcctgactcaagccttccagaggatagagaatcttgtcatagctagaattcagaaaccctggaagcatggccttgaggatagagattttgtaggagaagacagatttgcgtaactcctcagccagccagagttgttctggcgtgagaacaggagaaaaatccagcacctctgcaatatcttttaaatcttgctccatctcttctccatctgattgggacttcaaaccaagaacaatcccttgaatcaggcgattacccttaccaaaaggcacatgaacccgcatcccaacttccagcattccctcaaattcctccggaatcctgtaactatagggctggtccgtctgcatcaagggcacatctacgataatcttagctagggccatcttctcacctcctccttgtcagtacattcttgcaatagaaaaaataagattgagtccccccaaccttaaattttttcaccatcttctttttctttagcaatttgctctttgattttcttttcttcttcttctttgcggcgtttttcttcttcgatacggcgacgcactgcttcacgttttccttctggatctgggtgaattgtaacgtttcctgattcgatttcttctaaagcgcgaagagttgatttttcagacttgaaaccttgagttgctggggcacctgcttccaattcgtgggcacgttttgcttccaagattacgagtgaatattttgaaggaaccttgtcgagcaaggtatcaatagagggttttaacatcatttgcttgtacctattttctaaattttatcgggtagttggagattttggtaacatctcctgatagtgaccaatgacacgatccacacagaagtgttctgcttcaatcacacatttgacacgttcagcagctaggggtacctgatcgttgacaatcgcataatcatactcacgcatgagggcaatttcttccttggccttttcgattcgttgggcaatcacttctgcactatctgttccacgacctaccaagcgatcttgcaattcatccaaatctggtggtgtcaggaagataaagacagcatctggaacctttttcttgacctgaagagcaccctgaacttcaatttcaaggaaaacatcgattcccttgtccaaggtttcattgacataggtcagaggagttccatagtagttaccgacatattctgcgtattccaacatctgtccttgacgaatcagctcttcaaattcttcacgagtacggaagaaatagtcaacaccgtccacttctccaggacgttgtgcgcgtgtcgtcatcgatacagaatattgaaattggttttcagaactctcaaaaatctctcttctaaccgttccttttccaacccctgaaggaccagaaaaaacgattagtaagcctcggtctgccattgtgtctccttttagtcaatctgtgaaataacatttctctagaataatggcaaaaagccagattatcctttacagtctttctatctagtgtaacaaaaaagcagtaatttttcaactgctctttcttatttatttagcataatctactgcacgaagctcgcgaatcacggttaccttgatatttcctggataatcgagattgttttcaattttcttacgaactttgtgagccaagattgtgactttgtcgtccttgatttttcctggattgaccatgatacgaatttcacgtcctgcttgaagggcaaagctagtttgcactccttcaaagccgttagcaatttcttccaaatcatggagacgcttgatgtagctttcaagagactcactacgagcacctggacgggctgcgctcaaggcatctgctgcagcgacgataactgctatcacgctctcagcttcaacatctccgtggtgactagcaatcgtattcaccacaactgggggttccttgtacttacgggccaattccataccgatttcaacgtggctaccttcaacctcatggtcaatggctttcccgatatcgtgaaggaatccagcacgacgggcaagagccgcattttcaccaagttcgctcgccatgataccagccaacttagcaacctcaatcgaatggcgcaaaacattttgtccatatgaagtacggaactgcaaacgtcccataatcttcatcaagtctggatgaaggtttggcgcaccaatttcataggcagcagcctcaccgtattcacgaatcttattgtcaatctcttgacggtttttctcaaccaactcttcgatacgagctggatgtatacgaccatctttgagcaacatttccatagtcatacgggcaatctcacgacgaatcggatcaaatcctgacaaggtcaccacttctggtgtatcgtcgataatcacatcgacccctgtcaaactttcaaaggtacgaatgttacgaccttcacgaccaataatgcgtcccttcatagtatcgtctggcagatgaactgttgagtttgttgactccgctacatattcaccagcgatacgttgcatagcttgaaccaagatgtccttggccattttgtcagaacgttccttgacctcttgctcagcttcgcgaatgcgactggcaatctccctggtcaagttttcctctgtctgagccaagataatatctcgtgcttctgcctgagacagcgcaccaatacgctctagttctgcttctttttgtctttcgacttcctctaattgctcttcacgcgcatcaaggtttttcgctctatcagaaatactttgttctttttgttcaagtgtttgttctttactcgtcaaattgtcgtccttacggtcaaggctagtagctctctctgtcaaacgactttcgatttgtttgagttcttgacgttctgatttgaattcagcgtccacttcttcacggtattttctggcttcttctttggcctccaatagtgcttcttttttaagagacttgctttcacgtttggcttcattaacaagtaaatccgcttcacgctcagcttgtccacgtaaattagttgcttcttgttcagcatttaaaagcatcaactctgcagcttcctgagatgatttcatcttagctgagatgctgacatatccaatgactaaaccaatgatgacggcaaaaacagcaatcgcaagcgacatgatttccatgtttttacctcattttattgttattccgaatgacatacattcttttacattctaccataaaaaagtgattttcacaaacctaaaatagaatatgttttgaggaatttggaacacatttaccaaaataaacttgttgtttagaaatagtagtttagtagagacttgagaaaaagcctacctttcaatagacttagtaatgatctttaaaggacaagaaagccacgctatctccatccatcatataaatcaagcgattttctgcatcaatacgccgtgaccaggctccttggtaatcatatttgagtggttctggtttacctattcctgtaaagggatcacgttgaatatccttgattagtttattgattctttttaacgttttcttatcctgattttgccagtagcaataatctgcccaggcatcttctgtaaacttgagcagcatttcttactcctcaataacatggacctgagtacttccagcacgaacttgagccattcctcgcaaaaccttatcagaaagttccttattttgagcaattctcagggtttcttggatactatcccactcactctttgaaaggactacaatgtcctcatctggatttttattgaccaccgtcaaaggctcaaattcatcatttaccttcttcatgtagtcctttaaatgatttcggaatgttgagtaaaggactgcttccataaccatacctcgttttagctcttttccactattatacacgaaaagaaagaaattgtcaggaacttgtacaagattttcttttctatctatttatactcaatgaaaatcaaagagcaaactaggaaactagccgcaggctgtacttgagtacggcaaggcgacgttgacgcgatttgaatttgattttcgaagagtattattcgtaaaaaatctcaaaaagcctacctttcggtagacttagtttgtttctattctaatcggcactcttccaaaattttgctctgctatacttggcttccctagttggtaaatctggtctgctttttgggtcatagcatcccaaggttctttgccaattcggctgactagactgacctgacctttcaaagacttgagatgttgcctacctttttcagtaaatccaaggacatgaatggcttctggcaagtcactttctctagcctgcatcaaaatataggtcaataggcgtctgacacgcgccttggtgtaacgtttggtagtcactaactcgaccaattcttccacagactgggctgttttaatagcttctttaatgcgcacagccatttcttgattgacctgatagatggtggttaggtcgggatttgacaagatttgatagcggagcaagggaaaatagtcttcccagatcaccttactggcctgctcaaatagggcaacagaaggcataaaacgttctaagaaatcttggtccttctgatgttgacggagggctgtcgccgaggcaaagtccacatctttattcacagaatggtaacctgccccctgacgctgaatcggatgcagcttgatattccgtcctgcaaccgccttggcataggccagagcaagaacatgattgggggtattacctgaaaaatcaagaccagcaaattccttccacatagcttgggttttctggggataggaaagggaatcaggcagattttccacaaatttctccatctcagcacctttctctgtgtataagtcagcaattttctgataatctcgaacttcctctgtcccaaaaactagactatcaatgcccaagcgatccaagatatccatagctccttgaccaaagaaatcagctgcctgaacactgactaaaaagggcaattccactaccaagtctgcgccattttccagcgccatctgggtccttgtccacttatccacaatagcaggctctccacgctgcatgaaattccctgacatggcaacaattttcagtccctctgcctgatccagcaggtatttatggccattatgaaaaggattgaactccgcgataatacctgttatggtcatgctaatctcctacttctgcgccacaaaaaaccaacgggtgctagtttctgttggctccttatcctcaaagtctgcatagagtttgaaggacttaaatccagcctgttccagcaagatatcataggtcaagatctcataggtcctctcctcatgtacttcatcgtggcgactaaaggaaccgtcagcctccttgataaagaaagtcagctcatgcacgatggagtgaggaacttcgtcctcatatgtatcccaaagcatggcaaaatcttccgcattttcatggtaggaatagccagggaatacttcatctgtctggtaggtcgagtgcacgtcaaagatgaaaactccctcttcattcagcgcattgtacacgtccttaaagacgtcccctacttccacctcatcctgcatatagcagatagagtccgaataacacgtgacaaaatcgtatttccctgccttggacaaattcagcatattaccttctataaaagcaatcttttgcttggctgaagttgctctcttctccgcaatcttcaacatatccgcactcaagtcaagtccagtcacatcaaaaccagcctgagagaagcgcactgattgaattcctgtcccacaagccaattccaagagtttctttctctccttggtcttaggcaaatgacgcagagaaaaattcgtccatttgtcgtataaactatcgtccatgaccgcatcatagaccgccgcaaaggtttcataagtcgccataatcatgatactaagagctccatggtaaacaccactagccctttacctttctatcaatttttctaaaataagcaaagaaacccagttgactacaactgagttcatcttctaagcaagagcttctgaaatatctactgaattcgcctcatgccatagcttctctagattataatgggcacgcatttcttctgaaaagatatgcacgacaacagcaccgaggtccagtaagacccagcctccagctgcatcgccttcgacatggctacctttaaagcctgcttgagctactttttcacggatattagctgcgatagcgtccaactgacggctattcattgagctagtgatgaccaagtagtccgtcacactagtcaaatcttgtacatcaagtgcgaggatatcctccgcacgtttctcatcagccgctttcacgactagttctagtaattctttttcgttcatttaatcctctttttagaaaatatgtttgtaatctagaacatctgcaaagcgctcctcccaaatgtcctcataaaattcattaatcgtttctgctggaatgtcatccccatcaaaggttgtgacagcaccttctggaacaataagctgatagccatattcaaaggcaaccttgacagaggtatccacacaatattctgtctgcataccacataaaactaatttttcaatcccctgcttatccaagtattcttttaagccagtttctttgaaaatactgttatacttcttctgaaagaccttttcagcaggttttcgatttaaaagcgcagataactgccaatcttctgatgtttgagcttcagagttctcaatatgttgaacatagataatttcaatattcttgcttctagcctggttttgtaaataagaaattttttccaatagactttttgtctggaacccagtttctactaaaacattctgaacatcaatgattataaaagccgtcttcatttagtcctctttcaaatagtgcacaaaggcgttataggtttcaagggtttggggatagatggggaatccctgatgagctagatactccacggtacgagctgtttcgtaggccaccgccttattgagcgatagacttgcaatctcacgcgccacatctactccaggaaaggctcgattgtgctcgatatagtctgcgacgtagatgaccttatctaggtctgtcatttgaccagctccgactgtatgaatttcaatggctcgcagaatttcagaatcatgcaaatccaaatcttcctgaattttgtaaattccgaccataccatgccagacattattgccccagtttttgaggtcagggtctagctggtaacggtcaatcaagactagaaattcctgatctgacaactttttagcatagtcatgaagaagacctgctagacttgctttctcaacatctacaccaaagcgctgagctaattccatagcggcacgctccacacctagacaatgggttagacgtttctcaggtagaagctctgccattttttccaacaaggcctcacgggagcagttgatatagtcttgataggacatcagtagagcccttccttctcgatgtagtctagcactggctgaggtaggagaaagttgggtttccgaccttgggcaaggaagtcccgcaccatgctggacgagatatccatgagcggtacgtccacccagataactggataggaagtccctaccttgtagcgtggacgctgaacccccacaaactgaaccatgtcaaccagttcatcaattcggtaccacttaggcagatagtcaaccatgtcggcaccgatgataaagtaataatccgtatctggattcttctctgtcaaaatcttcatggtgtcgtaggtgtaggaaatacccttgcgctccaactcaatggtttcaatgactaggccgtcaattccctcaattgccaactcaagcatcttgagacgatggtgttcagggatggtttcctttttatcaacgtgaggaggttggtattcaggcatgagaagaacttgatccagtcccaactgttgccgtacttgatccgcaacaatgagatgggcattgtgaacagggttaaaattcccccctaaaatcccaacttgtttgcgttttttctccttgatttctggctccaactctaccttggtaaagggagtcaatagttcgattgtcataggctagtcccctttatttctctataaaaacagttatttggagtttcggtcttagatttctttgactttcttagaaatcttgcgattttctttcttgctagattgtttaaacaaaatcaagatgcgtcctattttttggactgtatccacaccgatttcttcttccaaaatttcagctacttcgtggatgttttcatctgtgttttgtaagagagtaaccttgattaattcacgcgcatcaagagcttgacggacgctggttttgatttggtcgttgagtccatttttcccgatttggatgataggtttgagggtgtgtgcctggctgttgaggaaggcacgttgttttgatgttaatgacataattttcttccttgttttttgatagttattttaggtggtgagggacggtcggaactaattttccaaagatttcatctttgaaaaatggatttcctgacctcacaattgagtcttggtctcaattgtgccccttgccaatctacagattggcaatcacaccacagcaataactatcgctatatgagctcactttgttcgctcagcgattttgttttaaataattgcttttcgtgtgacgacggcgacgccttctggtgcccagacggcgacttttgctatgcctgttacacgaatccatcctaggcctgagataactaggtctgtcttatctttaatggtaaagacatgctggactagccttgggaaatcttctttttccttgctatttggtggtgtcagaagagttcccaggtgcttatcgtagaaagcactagctccttcaagcttgctacgatggagtttgagttcattatcaaagaaagcagtaaatccttgcttttctcctgctataaagtcaaagcgtcccaaaccacctaaaaatagggtttgctcaggattaagctgataggtcttaggcttgatttcctttttaggactgacatacttgaggtttttggccgtcaagtagtgagccatctggtggcggtggataattcccggcgtatcgtaaatataagatccgtcgtcaagcggaatctctattttgtccaaggttgtccctgggaagcgtgaagtagtgatgacattctgatcacccgtgatttcttggataatagcattgattagagttgattttccaacgttggtcacaccgaccacatagacatcgcggcccttacggtagtgttcaatcttgtcaatgacttccttaatggcatgtttattttgtgctgaagttaggaccacatcgactggacgaagaccttcttcatgggcacgtttcatgagccactggctaatcttaccagacttaactgacttaggaaggatatcttttttatttcctaccaagaggacatcattgcccgagacgaaacgtggtaaacctgggatgacagatccattaaaatcaaagatatcaataacattgaccactaaagcatcactgtctcccacctcgtgcaagagcttgaggaaatcatcgttcgtcaactggacatctgtgatttcattgtagtggcggagacggaaacagcgttggcaatagacttcgccagtctccaaacctttttcaagtgccgactggggggtaaaaccaagaccagctttatctgtcgtctgaatggttgctccacaaccaatacagagaatttcttccatagttaaattccttttttatatgtaatcggtccgtacttttcagtgatttttctcataacacgacgctcacgagttcggttaatctgcgttttgattgagtcatgttggaccaagggtttgactaaaattgaccgaatccctgcacggtgggctgctcgtatatctgtcatgagttggtcaccaaccatgaccacttcctttttgtcatagtggaattccttcatagcacggtcaataccaaatgtgaagggcttcaaggcccagtaaacgtaatcaatcccaaatttctcaactgctcgttgaacgcgttttttggtgttatttgacactacgataatgccaatacccgcgtcccgaaggtcatgtagccattgcttcatctctggcgttccatcagggttgttccaagcaatgagggtattatccaaatcgaccaaaacagcctttattccctgcgcctgcaggcttgggactgtcagatcatagactgcttccacagcaaaatctggtatataattttcaatcgccattctggctccttttcttaactttttttcgcaattttccttagtaacaaggataaaacaatccacaaacctgcactagccaaactgatatagagccaagcatggggctcatctgttaaaggtaagggaacattcattccgaaaaagcctgtcacgactgccaaaacagctagcaagactgaaatgatagtcaaggttgtcaaattgtcattcagattattgtttagaatattgttgtaagaggctgaaagctgctgtaaaatctgagagattaggtctgtcatggataccagctgatgagcctcaatcatggcatcatcaaactgttctctctcaatctcatcaaaactacgatacaaggcatgaccttgaatatgctctaacaaaatccgattttgtttggcagctgccgtcagataaaccataccagtctccaaatcagacaggacaaagaggtttttcttggtagttcgctggcgcaagaggtcattgacctcatccctactcttgtccatctgctcaatgacaggatagtaggcattgctgatgatttccagactggcaaagagaaacttataaatcgaaagcgtgtcatggttctccagataacgagtcatctgttcaatgacataggcgttcttggtattactaatggtaatcaggcgacgatgctcgacaataaaggtcatgggaaaagtctcatagtaggccttgtccttttttacgtctaagacattatagataaaggtaaccgtctcactttcacggtggtagtccatgtgggcgcgctcgtttctatccagtgcgtattcaatggtttccttgtccaaaccgtaaatttcagaaaggtcttctagtttattcaactttcctaggtctaggtctatccaggtacaaccattgcccaactgcttttctaaaaccatcttttctccttattaaactccctctattgtaccacaaattacttaaaataacaggtctagtctgtgcgtgagaaattgctaacaactgtgatatttcggttagggacaaagtgaagggcttgctcctcgctacgaagctgtgtcgtacgaattcccacactgacaaccttacccgatacagtaatcggtccatttgtcagaacgacctcatctcccacatccagttgacgttcaaagaggatgaaaaagccattgatgacatcagacagaaagccttgggctcccataccaatcgctaccccagcaataccagctccagccagcaaactagaaactggcaaacctaaaatcgacaaaatgcagtagagtaaaaagaaatatagcgtataattaaacacattttctagtaaacgtgagatggttttttggcgtccaacatcatgacgagacatttttagagaaggtttgacaattctctgcaccatggtatgaagcatttttttagcaatataaaatacaattaaaagcagtaaaagagaaatgaccttggttagaatattctcgataatggttgtcacatctagcttttcaatataagcctgaataaatttttgcatataaaactcctttatttcattataccatattttcatcagtctcattctccataaatattcaaaaaatagacagaaaattcttgattttgtctatcatttatactataatcataatcactacacaaaaaggagattattatgaaaagaatcattcatgcttggaataaggcaagccttgtcaagcgtatcttgattggtatgctttgtggggaatcctaggactgacccttcctaatctctcagggattgggctactcgaggatttattcgttggaggtctaaaagctgttgctcctatcctagtctttgctctcgttgccaatgccctttcccaacatcaaaagggacaagatagcaatatgaaaactgttgttttcttgtatatcctatgatagggactttcgccgctgctcttgtagctgtactagcaaatttcatcgtccctattgaaattaccccaaatagtgccaatactgaaattgcaccaccagatgggattgggcaggttctcagcaacctcttgctcaaactggttgacaacccagtcaacgccctgcttactgctaactatattagaatcttatcttgggcagtcatttttggaatcgctatgagagaagccagtaaaaatagtcaagaattgctaaaaactatcgctgacgtgacttctaaaattgtcgaatggatcatcaatctggctccatttggaatccttggtcttgtttttaaaaccatttctgacaagggagtcggaagccttgccaactacggtattttattggttctattagtaacgactatgctttttgttgcccctgtggtcaaccctttgattgccttcttctttatgagacgcaatccttaccctctagtttggaactgcctccgtgtcagcggtgtgacagcctttttcactcgtagttctgcgactaacattcctgtcaacatgaaactctgccatgaccttggactcaacccagatacctattctgtttctatcccactcggttctactatcaatatggctggagtagcgattaccattaaccttttgacccttgctgcagttaacactcttggaattcctgttgactttgccacagcctttgtcctcagtgtggtagcagctatctcatcctgtgatgcttcaggtattgccggaggttccctccttcttatcccagttgcttgtagccttttcggtatttctaacgatattgccatacaaattgttggggttggttttgtgattggtgtcatccaagactcatgtgaaacagcccttaactcttctacagatgtcctctttaccgccgttgccgaatacgcagcaacccgtaaaaaataactcatcaaggcaagcctgctcatgtcttgtcttttacgcttttattctaacttattaggaaattcttatgtctattagccaacgtacgaccaagctcatcttagctacctgtcttgcctgcctgcttgcttattttctcaatctttcgtcagcagtttcggctggaattatcgctctcttgagcctatctgatacgcgtagaagtactttaaaactggctcgcaatcgtcttttttctatgcttctagctctggctatcggtgttctagcttttcacttgagcggatttcatatctggagtctcggcctctatctggccttctacgttcctttagcctacaagatgggctgggaaattggcatcacaccaagcactgttttggttagccatctcttggttcaagagtcaacctctccagaccttctagtcaatgaattccttctctttgctattggtacaggatttgccttgcttgttaatctctatatgccttcacgagaagaggaaatccagcactaccacacgctggtggaagaaaagttaaaagatatcctccagcgcttcaaatactatttatccagaggagacggacgcaaccgagcacagctggtagcagaattagacacgcttttgaaagaagccctcagactggtctatttggatcactctgaccacctctttcaccagacagactaccatatccactactttgagatgagacagcgacaaagtcgtatcctgagaaacatggcccaacagattaacacttgtcaccttgccgccagtgaaagcctgatcttagcgcaactcttttcaaaaattgcaggtcaactgagccagaccaatcctgcttctgatttgctagatgaaattgaacgttatctggaagtcttccggaaccgcagtctgcccaagacaagagaagaatttgaaacccgcgccacccttcttcaactcctacgtgaagccaaaaccttcatccaagtaaaagttgatttttaccaaaaatatagacagtaatactcttcaaaccacgtcagcgtcgccttgctgtatatatgttactgacttcgtcagttctatccacaacctcaaaacggtgttttgagctgacttcgtcagttctatccacaacctcaaaacggtgttttgagctgacttcgtcagttctatccacaacctcaaaacggtgttttgagctgacttcgtcagttctatccacaacctcaaaacggtgttttgagctgacttcgtcagttatatctacaacctcaaaacggtgttttgagctgacttcgtcagttatatctacaacctcaaaacggtgttttgagcagcctgcggctagcttcctagtttgctctttgattttcattgagtataaaaaagaaaacttcagaccaatccacaaaaggtgaatatctgaagttttcttttatttataagtaatcaccataaaggttaatagtagaataaataaagccaaactcaccaataaagtgagcaccttgaccaaggtgttgctctgccagtagcttggtttaccaatattactagtggcatccatggaaaatagttgattttgacggggttgtatagttaccaatacaatcaaagcaagagataggataatagctaaaacaattagtatttcaatcatagatctacctcaaaattcccagcaaagtaaagagcaaaccaatcagaatcatcaaacccagtaaaagtgaaaaagtcttactaatcttttcccctcgggtttctttttccttcttgatgggtttttgtttcaactcttccatgcggccttcaacgtctttgtaaaataaatcttcctctgacatgttagcctcctaaaacagtttgcatggtttcctgatatctcaccaagtcaacataatttgcatgttggccttgtttgccaagtgcctgacgcatttgatcaacatctgaaagggccaatttaatggtctcaaccaaagcagcaacttcactactttcaaatagatggtctggagcgatataaagtctattgtgcaccgtctgattaaagccaagaatcaagagattgtgctcaaaggcctgacgcactgcctgtagcaactcattactgtggtttatatccaagtaaatatccgacagttgatacagctcctgaatcttctgtggactagcgttctggtaaagggccacattaggatagcaaagcatgtctaagagcttagaagacatctctgtcaccgctgcaatacggaaagtgacatcaggcaaggctcctgcgattgcttctacttgctcaatctgatctgaattggtcaagattaaggcatctcgtcttaggaaattatcacgtttgaactggtaatgataacccaagtgcacaaactgatcatggtatttctcgtcagttaactctaaagcgcgctcataagtcgccttatttggaatgatgatcttcttagtacgcacattatcactttccaaaatcaactgcatattacctggaatggcatcatagagaggttcctgccataccaagacatccgagccagatttatctggatgatggaaggaaaccaagaaaggagtcgctagagtattaaagataagctgactggtatctatttccaaatcttgcaaaaagaaggtgataaattcaactttatttgcaaagtaacgcatggactgacctggcaaagtcaataagatatcacccgtcacatggttttccagtaaaacttgttgaccattgacatcttggtaaactgtcataatcggctcgctatctgcgctataagtcgttgtagcaaaacaagctccgaagcgattgtagtggtcaacctgacgtactcgaccttctaggtctttccagtctacctgtttaaccaagcgagcctgcattccatcagcataatgaatgacagccctctcctgcgtcacatcttcaatacaagcagactgattatctcctaaaatttcccaaaaatctgaaacgggaacttgattaaaatagagaggttttccatcctcgtaacctagataataggtaaaaggagaaagcagaccatcaggcagaaaaccatctgcatcgatgaccactccaagttgagaaagaccagtagcgcctagactttcatgtaaatctcgactttcttgactgtaactatcataaagttcaatcatggagcacctcctctactgttttcttccacttttctaaaatttctttggtcaagaagccttctgcaatttggtaagaataggcacgcatagcttccaaacgattttcttgatacaattgacaaatcttagcggcataagcttgcttgatttggtcttctacatggtcagatgaacttggaatcaaataaccattttgcccatcctctataaaggtctgattaccataaggcacatcaaaaccaattagaggtagacctgaaccaatagcttccatcaaggtcagaccaaatccttcgctggtagaagccgttaagtagacctcatactggctataaatctgcgaaagttccgcatgccccttgagttggatatagtcctctgcctgatgatttgcaataatttctctaagcagagaatcttctccaccactaccatagatatcaaaggttagttccggtaactccttatgagcttcaatcacagctttcacaagccaatcaatgtgcttttctttggcaagacgtgaagccgtaatcaatgaaaatggtttgcgcccttgacttgaatctgtcaaggaatcaatactgcctacaggaatggtaacaatctttggctgatgctgagtatatttggcaaattgctcttgtagaacttcattttgtctatcagtagacacgataaagaagtcaaccttatctgcattggtaaactgatagtcataatagttattccaaaggatatagtcctcatttgtagcattttcactataatgctccgcatgaacaactaccgctagatgtgctgtctgtgcttcctcaaacacaacctgtccaatacctgtctccctatcgagaatgaccaaatcagacttattcaaattcaaagatttcataaaggcacgcacaaaagcttgctttccatagaaaatcttatccttgaaatgataaacttcttccttcccttgattcatcaagatatcatagactggagtcccgtcttcattataaaaagttcgttggtataagactgcaacattgtccttgggagcaaaatactcgctacaataacgcgtataagaaaagtaatccttccgaatcaggtttcccttaaaaacatactcggcatgttgaaccaagtccttgttctcatcaaccaaataacaggttacaaacttatcttggtcaaaaaagaatacacgtaaaaccttgccatttttttctctgtgactttcttcaccaccaaagtaagccaagacatcatccactgtcacgctagtaggtgcaattttgatatctgtgaaatgattataaagccagataacctgattatcatcaaaaccaatattggctgttaagtgctgaatattatcggctaaaatcatatctgtaaagataaacttagaggacagatttaatttccgaaaaacaccagcacgataggcttgagcgtattcaacaccgctactagcccaaccaattcctaaatttatattgtaaattgtcatattttctccttttatggaaaatgagtcacgatttcaccttttggagtgacctcaaccagccccatcaggagattacgcaccatatccgcatgaatctgttctttcatagcttcaaagcccgcgtaggcttcttgatagtactctacgattggatttttctgactagcagattgaccaccgatagccatggatagctgttgtagatagtctacctgctctacccagttgtcatcaatggctttaagcagtgaaagtcgtaaaaactgttcatataagtcatgttgattaagtaattctttcttttcagaaagttctttatcaatcacctgcttcataaagctacgaactgcagttttgtcagttacatctatataatctggaacctctttaacatgaaaactaatattggtcacaataaagtgaaacaataattcacgactagcatagtgatcagccgctacctcttctgtatatctctcaatgatatccacaacaacatcctctaagtcacgagaaccatctattagacgatttctctctttatagactatatcccgttgtatattcatactttcagcatactccagagtctgacgacgtgctgaacgtccagcactatcactggcatgctgagccttttcgactagtttccggtatttacgacctttcaatacttccggttgagtcatatcttgaacctgatagtctttgtactttttatgcacccaagatggaccaaatttcttgataacatcatcctctaaggatacaaaaaatttactcataccaggatctccctgacgaccagaacggccacgaatttgtaggtcgatccgctgactttccatccgctcagtcccaataacaatcaagcccccaagctctgcgactcctttaccaagcttgatatccgtaccacgtcctgccatagaggtagccactgtcacagcccccatctgacctgactcggagataatctgagcctcacgcgccgcattattagcatttaggacattatgggcaatcccttcacgaaacaagagagacgaatagagttgagacatttcaactgagcctacaaaaacgagtaaaggatttcccttagcatggtattgcttgatgtactccaaggatgcatacactttttcaggtaaagtgatatatagattatctggatagtcaatccgttgtctcggacgattggttggaatgcgtactacagacatattgtaagtttcaataaactctttttccgcgaccttacctgtccctgtcataccagatatcttattaaacatcttaaaaagactctgataggtgatcgaggccatagcccgcgtctcaggagataatttgacatgttccttggcttcaatagcctgatggagacctccttgaagtttagtcatttccattagacgccctgttcccttatcaaccagtaccatctcatttccacgaatgatatagtccttatctttagtaaagagcttatgagctcgaatcgcataaaccaaatgacgagcaaaagacgcatgctcttccttgtataaattatcaatccctaggaaattctcagcagacttggcccccttagtagtgagccaaacctcctctttctcctctttaaagatataatcctctccttcgaccaaggttgttacaagtgtatcaatgatcgcatagtaattagactgaacacgaggagaacccgcaataatcagaggagtttgtgcactatcaagcaagatatcatcaatttcatcaataatcacatagttaaacggtcgtaaaaacttaccttcttcattcgaggctaggttatcatttagataatcaaaacctaaattactattggttgtgtagatgatatccgaagcatagataagcttcttttcttcagctttcatctccttctttggatcttccgtaaatggtacaccaatggtcaatcctagaaaacgataaacttgacccatttcctcggcatcacgctttgataaatactcattaggagtcacaaccatcactccttctcctgaaaaagcgttcaaatagacaggcatggtagctgtcaaggtcttaccttcccccgtattcatctcagcaacatttccatagtgcatgacaatagctcccatgacttgaacatcataaggaaacatccctaaaatccgcttatctgcttcacgcaccacagcaaaagcttcaaccaaaatatcgtctagactttctccctcggaaagacgctgacgaaactctactgttttagctactaattcttgatccgaaagagaggacatcttgcctttcagggcattaatctgctttaaaatctttttcactttcctaagctggaaatcttgacctaaacgtctaaacacttctgatctccttgatagaaaaatgataaaaagttaaggactcaaatccagcacttaaaagagaaactcgataagtataactatcttctggataagtaaatatgaaatctttcactttttctacctttttttctaaaatatcaccatagcggtcaaaaaaagttatcttggtataaactccattttcaggctgacagtcaaaaaccagtgatagttgatactcctgctttctttttaataagggaagctgaggttgggttcgtgcagcctggtaattgacactagaaaaccaagtctttagaatctcaccagatggcaatagaggattatacagacgaacacttttgtcagggtaataagatacagttgttccatacatataagtcccaccaacttctccccaatgaatagactgtctctgtgtaataatcatcttttctcccttccaaaaccagtctctaagaccattctataaaagtgcaaaaaccaagaaatattggtatctgtatcatcattgtgtcgtccagcagttcctttagataaaatcttcgcacctgtattacacagataagacactaattgttcataggcttgtggatccatttcttcatctttcatataggataaaccaaaggttgtctttgaaaaatttgcttgtttaaaaattttccaaaaacgctgatccaactccgtcatatcttgagaacttgtcccacctgtatgatgaattaaacaatcaaaagctaagttagagacacccggtgcgtccaaacgtccacgactagctatagttcctaaattagccaagggcttaccaactatgatggcatggggttcaaaagaagcaccataatagagagccggaaacgttcccatagaaagacctgataaaatcaaatccttatgatcaaagcctaaataatcaagatagtgagtgatcgtatcctttacttttccctctagctcatccgttccgagataaaaagctcccccctctaaacgtggatcagaaaataaaatgaagggacatccaagagttttcatcataaagtaaccctcgaatccttctgcaggtcgataacctgcaaaatagacagtcaaaggcggtttaaaatcacctggatggaagaaatagtttatttcatcacgcttggaatcatgtaggatatttccaccaagtacaaacttaccaaattgttttcgactccatcgttggtgaagattacctagtttgatagttccacgacctcttgcttcaacagatatcgagagaaagtagtctccgtctcgactatccataaaaagtgcttgctccaagtctttttcagatactattacttcttcaaagaaatcatcaacagacccactccacattttacggattactaaacgaaagtcacaattgccttccttctcatattcaagccacaactcaatagggagtgttttttgcaccataatattataagcccaataggcaagctgggcaaaatcttgcccaaactcaccttccaaactgacataatccaatccttgataagaaatagctcctgtaaaatttggattgacttgtatcgtcggaggaaagagtttatcaccatacccaccgccaaaaagagatttacttaaatcattgattagttgttggggacttaaaaaatcaattgcttgtgcacatcgtttttttagaaaatccacaacctctctatcatttatttgtagattctggttataaaataaagtataaggttcaaaatattttacataggaaaataagtctctggaatactgaccatcttctattaaaactgcatgaaaacggttaatatcctctttttcaattatttcacgaagggcttttgatgagtttgggtaaaaataataccaactcatattttcaggtatgtcatagtgattttcccaattggcaagtcctatctgtaaaatattaagttcctttgacatttttaacctcctctatccatttctctaattttccaagaaattgttgtcctgtgtgctccttaatcttatcaattgaatatatcaaggactcattccactccttcaacctatctgtgtaataatgtgcagccttagaaaattctgtaacatctgctaacaaataaccattttttaaatgttcaacatagacggtttcaactaggttgatttgaggaattcctgcactaatcccagcaatctgtgtgtagagatgaggatgtctatttaaatccacaatcaaacggacaaattctagtgtttttatcaaatctaactcatcattcaagttaacaaactgtaagcgtaagtcctggtgttgattttcttccagaggattttctgcatcaccataatcaatcgcctttcccagattttcggattgaatgttttcttggatgaaagactcaacaatcccttcaacctcattcatttgctcctgactagcagcaaaggctccaaaaatcacctcagtatccttattttcagcgacaaaggacaagacttgaagcagagcttgattatcaatcccctgctcaaaatccagttgaaaataaatgatggattctttcttagtttggcttcgtcccaatcgtaatcgggtgtcaaaagatgataaatgataacattgatgcattcgttcaggatacaactcctgcaacaatcgtaaactatcctctctatccaccaaaatcaaatccgatttttcaaaagttacatctaaatccctaaaggtatcttgaggattacgtccaatgaacagactcaacagtttaggattagtactaggtaaacgatctagtaccaactggtcatgatgagaatgagaaggaagcataaaaatatcctgatccttcacatacgtttgcagataattctcaaaaaattctgccaccagatctcccatattttgataggtaagcattttaaagcgataacccaaaattggattgacttctacctgtcctccttcttttaaacgctctctgaattgccactctcccttgaggttcagatattcttgataggctgcttgcccatcttcaaaaaagataatgctcgatacaaacccacgatcatccacgatatggtgcatatgtatttgaccatttggttcaaaatactgtatatcactgatgaagccttcaactccatgttcaaccttagcaaatttcttcccatttttttgaacgataatcgtaaagggactataaataaattcacagtcatcatcccactcaatatctctaatgcttaaaacttgggtatggagattatgaaaatcttgcataacatcaaaaacggaataagtatccatttctaacacaccatgtctatataaaaaataacgtagatgaggctggtaagctaatactaatagacgagaatctatatcttgctcttgaaagagccgaatctggtgaaaggtatcatcaaactctagacgaaaatgagaaaaataccatggagtgatatctgcatgccatgttctttctgacccataccaagctggaataaaataatacataaaagtctcctaaatcaaaggtctataggtctcatttagccttaaagccttgacctcgtctctaatcgtaaaaatcatgcccccgaacatcataaataagcctggaatcattgccaatcgtaataacttttcatcaaacaaaacaaaaagcatgggaccacctgccataatcacattaaagagaccacctatgactgagaaacgaaggaccaatcgattaataaatcgactagtatccgcacctggataaataccataaatgtattctccagattttttcatacggtctgcaatctcttctccattcatcgtaacaaaagcaaaaatgatactaaataaaaataagaccgaaatataaacatagacccacaaaggctttccaaccataaattcctttgataaagccgctaaccctgaatgattagggaaaataaatcccaacaagatgaacaaataagctggtacactaagaaaactcatcacatacatataaggcatcccacctgcaggattcaacatgatttcgagataagaatagcgtttaaatcgattgtgtaagccaattttattaacaggaaccaaatagcgagctcgatacataagggcaagtaaataagaaaagacaagggttaataaagcaagtaacacaataatccctgttggaatgtgtactgtctgaaatgtttccaaaacatcctgaggaatatttaaaaccatactggataggaggattacaatagaacctccaatccccatactcgcatttaaatctgacaaccaaacaagaaaaaatgttcctgctatcagcaatattgtattcattagaacaaccaatattgcagaataggaggattgtactggcagtctcaagctaactgccaaggattgaatcacagcaattagcaaggtcaggtacattttacggcgatcttgtatttctatagacgtagatgttaaacccaaccgtttagaaaaagaaaacatctgccataaaatcatggcggacatccaaggggataatccaacagaaaaaattgataaacttcttagattcccacctgttagggcggctgagaaggctagataggctgttgaacctcctaaaaaatctttagtatttaggtcaacaaaagggagaataatacgacttcccaatacatagataaacagtagaaatgaggtaaatagtcctttttttactgctattgacgaataaatcttagtcataaaacactcccctcaccttcattgtttgtgatatggtaaataacaattcttttatttcaacttttaccatttctttgttctgcatcaaaaaacaactttaatctgaaacaaatatctttatattcctcagtatctgttaattgatggtattctaaagtttgcttataatcttttaaaagattgacaaatcgaatacgcagaacggagacatccaaaccagccaagacacaatccgatattttcttagaaaacacttcaacaatatctcttgcccaggaaagatcaaattccgttctcatgatgcttcctgaacgtcttctatacagatagagattatcgtttataaagacgattttagaggctaaaagataaaagcgatgcatagttgcttcatcatcaaagcggcgaccatttgaaaagtgaacttcattgaataattcttttttaatcaacttaaatgtcggcaatataaaggccgagctattgaatttccaatctcctgcttgacggttcataatttcttgtatagctaattcttcgacgcaaaaatcttgccctgttacataaaaataaaaattcccgtcactttcgtcataattatagtaattccctataacaacatctgcatccttttcttggacttgctgataaagagtttcaatcatattttcttttacgatatcatctgaatcaacaatcgtgatgtactctcccttagctacactaatccccatatttttagcttgtgctgccccccccttattttcttgatgcaatactcgcacacgattatcttgcatcataaaagcatcacaaatttccccagaattatccgtagaaccgtcatcaactaaaataatttctatattttgataggtttgcttcagaatatgctcgacacactccactaaatattttcccgtattgtatatcggtaccacaacactaattaattcactcattactctatctctatattcttcattctatccactaaatcatctggtctctccacagaaaaaataccgtcatagagtccatcatccatacttttacgtgtgatatcaaaagcgaagattttcttgccactttcttgtgcccttgtaactacattaaaaacctctccacctgtattaatatctaaataaactatagaatcgtccaatagccaatcaattctactatgtaatacattttgatatactgttacattcgtatactgtgatagagaggtcagctcctcagaacaatcacacggtgcagccaaatgaaaatgccaatcaggtaaccgttgtactaaatactctaaatgttttatatctgcactccatgtcacaagcatcacttgttttttagactgattgcttctttcaaaataatttaaatcggaacgttgaaaagcaatctctgaccaatccaaatctctataaacccaccataattcacgtagtctagatatactatatgtattccaaggtttatcatgactagcatagtgaacaattgtaggtggattgtcatctagacgttcacattcttgagcaaggtgataaatatcaatacccaccatataattatatgttttatctaaggctagccaattatcctcaaaataaatatttaaaatactctgatccccaagatgaacaacttgattctgctcggccgctaattccaataaactattgacaatagaatgttctttccactttgcaacatccattagtaacataccagtattaaatccagattttcgtccttcataggcatagacatcatcaacagcaccaattgaatatcctttgagatctatctcaaacaaagtagctagttccccagttacaatgatatcggaatccagatacaataccctatcagattcaaccacttctgtcgcaaaaaatctaaagtaagaagcataatttatatgaggtcctgttttatagctttcaaaaagttctttatcaatgtgtacactgcgaattgtagaattcacaacttccatttttctccccaataatttaaaccattcaggagctatatcactgttgagaatataaaaatcaacatctctattgtgatacaatacagactttatagtcgtctctaaaggaataagataggcattatctgccgctaatactattgattttctcatactgttctctacctcatgtaagatctgattgctgcaaccatttttttcggaatggagcttggatagataccttcatatgaaatctcagaaagattttcagagcaagtattgtcgaaagctatcattggttttttgtacttaagcacaaactcatatgcatcttctaattttcgatcatgattcaaatccaaatacaaatctgaagctattactatttgttccaataacattggtaaggaatttggatatacggtaacattaggaaaacgcgttaaagctagtagttcatttgccatatttgtataagcaacaatatgaaaatgaacttctggcaattgctccgccaaataatcgattttctcgacacaccaagaattcgttaaattaacacattgcaacttaaatatttgtgatttactagggtacttcacactctttgaaaaccattcatttaaaataacagaccaatccatcaaagagtattcccaccaaacttctcttagacgtccaacagaaaattgattccaaggcttatcctgagaaatatagtgtaaaattagtggcagtggttcgagcggaatatcaaaaatgaattgatgtttaaaggttgccgccccataatcatatcctatttgaaaattatattgatcttcaagggaactatattgatctttaaacaacatattcaaaattgactggtctccttcttccacattctcatgttctttttctgttaagtcaatcaatttttgtcgaatagtttcagatccccattttttgttgttaatcaagagaacaccagcattgaagccgactcctgctccaaagcaagaacgagctgctgccaaataattttcacctaagtctaattcaaacaaatcggtcaaatcaccagtcacaatcaaatcactatctagatagagaactttatcttctgttacaaaatctggaataaaatagcgtgcaaatgtcatatgattgatatgaggtaatttattagaccaattcatttgaaactgtgagccaattaacttgcagtcaatcaagtcgccccccatctcttgtaaatatattcttatttgactaaaccattcctgaggaatgtcctgatttagcagataaattttcaaatgactattgtgtctacagagtgacttcatcgccgtttcgatttgtcgaatataagcgtaatcacctgcaaatactacagcgcgtttggtatttctcattttaaatccttatcatttattttaaatagtctagtttaatattcgtgcaacaatctgactgttataggtttcatcatcaataaattcaatatcttggtcgaaattatgttctgcagtatgtttatgagaaaatttaaccttagttttagctcccattttcatccattcatactctgagtcaatatggcctacatccaaaacttgatagcccatctggcatagattataactcagaacttttgctgtaggtccaagcatacataaaatcaagcgaccaccagcatacttttcaatttcttgttcaagttcatgaactctagaaaaggcactatgagaaggacagataattcgcttaatagaatttgcctcatcgaataaatcatttccgacacctgaacgagaagtcgcaccttcgactatcagtaagtcacggttttcccaaatgcttttcaatttttcaaattgagctttagcttgactcttgtcttcaaaatcgatataagggcgagatacaaaggttgagccataccatgaatcactgcataactctctgtaaaaatccatataatgatccatgtgatctttccaaaatggaatcgcccacgatgtaaacctaaaacgatctgtaaaagcatcaggaaggcacactactaaatcttctcgactttcttggccgataatgtccctcatgattgaaaccaactcttcatcataatcctggtagggaattgaatgccctgcaagcatattgatttccccatctccaaaacgaactaaagaagagttgtgttcaataatataatccaaggtttcatctatccctttcacctggattatatcaagcggtttttctagcatatccttagttatcaatttttgcaaatcagccaacattcgttcaggatgttcacttgaatacaacctttggccattattcccattttgagatttataaaaggctagtataggtttagatagatgagccatttctgcaacgatatcggatgttgaagtcagtaggttgatatctaaataagcatccatcttctccttcaactcgtctagcttatctctagaaattgccggatagagctgaatattaggataacgattagacaaatcatataattttggccccatagctgtccaagcagcaatttgaaaaacaacatttggcaactgtccagccaagtaatccaattgttcgatatactgagaagccgtaaacgttaaacaagttaaacttggaagttgtcgaaaacaggtaagatgtccgtttttcttaaaatctttaatcgtatcaatcataaaggaaactttcccattttcgaaaacgatttgtcctaactctccgtgctgagtcgattgaaaagctagtagcgttttttcttgttcttgcaaagattttaaaaagttctcatctgcactaccatgattgatatccaaatatagatttgttgactttttcagcttatctaagaccggtggaacaatttgtggatgcaatctcacattattatatacagctaatttttttaatttatctcccatatccgtccaagctgcgatatgaaataccacctcaggtagagctgtaactagctcttctattccttctaaatcttgggaattcgttaaggttaagcaagaaaattccttatctagaggcgatattagttcaaattctcccatatggtgttgtaaaatctgactccactccaaatcatggaattcccaccataaatcacgataacgattggctgtcaaggtagtccagggttttctgtaggtcgtaaaatgaatcaccactggtttatcattaaaagccagatgttcctgccaattgttatacaaagccacaatatcatgccctacttgtaaattataagctcgacctagttctaaccaatcatcttgcaagacctgattaaaaatcgtttgatcaccattaaaatgctcgaaacggccttcttcaacttccttcattgtaacaatgctctgttcaattagtcgttcttttaatttctcttgacgccattttttattgttgattaataaaacacctgcattaaatgtaattccatctgtatctttaactgctgcgagtgatttttcttctaaacaaatactaaataatttctctaaagaagtatttacaatcaaatcactgtctaaatataaaaccttatcttcttggatataatctgcaataaaatatctagcataagtaatgctactaatgtgatcttgcttttcccaatcttgaaacacagtttgttcaggtagtttaacatcgataatctcactacctaacatgcgagctatttttcgtggtttgcgaaaccaatctggcatgatatcttgattcaaaatataaatcttaacatctcgattgtggtataaaatagattttatcgttgtttctaactgcctggtgtaattgcgatcccctgctagtacaattgttttgttcatttcattcccttaatcaattcccaagtgatagattgcatctaccaataactttttagtgaaatagccctcttttaacaaatagctaaaggtcttgatacgattcgtcatttcttgatattcttgtagattcattttatcaactatctcatgaacctcttccagactatccgccataaagcccaagccttgatctactataaatttagcagttgacaagctacttggtacaatgactggaatgcccgctgttagataggtactcaccttatgagatatattcaaggtatagtattggttactttctccctcattttgatgggttccccagacaaggccaaatccaccctttgataattctagcaacaattcctcatcttttttccatccttcgatgctgagacttctagcactagaactagcttcccctttatttgaaaatactctcaaaggcgtatcttgagaccaattttgtaagtctggaaaacgctctaaacttccagcaaaaaaaagttcttttttaaaagcaggggtgtataaggataaatcatgaggatgatcccacatcccttgaacaagaatcttcttagtcgtcaatccttcttccatcaggcgtgttttcattctctctgacggcactatcaaaacatctgatagattatacatatacagataatctttcatgagataatagttactatcaaacatgaggggaacaacatcatggataaagcaaataattttcacctgcatatcctttagcttatcaaacaagagacgatcaaattcaaaaccattccaggttggagactgaaagactaaaatatccccaatagagatactggccataataccatccagacgcttattcatttcagaaggactatctgaagcaatgttgtaaaaataaataccaacctctctaaatcccagttgactagctatcttttgaacagcattttgagctaagataaccgtactatcaccagccatgccgtataaatttgttaaatgtagtttcatattacgctatctcattttttattactatctacggaagtaaagacaatttttccatcattcttctgtaaatctctgtgaactgcatattttgttcttctaattttgctatcactctttgtaatctatttttataaatcaaaatatgattggtcaagtcatagtctgaacttgctaaaatagctatcttttcttccctagccccaatttcatcatacatacgcttttcactccatgtattcgataaagtatcagataaaccaacacggtaccagtaaacacaacgattcaaatagactatcctcgaagctcttagaagtaccttccatgtccagtaagtatcctctgcaatttttcctataggaaatggtaaatcttgtagtaactctctcttgaataacttcaagacagctacagtccagttcccatttctgacttcttcgacaccttccctatccataattgctttaccttctatcacttctagagaatcatctggatccgtaacataagtcatatacacatagcgtgtttcatcataagaattataacgcccgatactaatatctgcgttttcctttttcaaagcaccatataatcggtctaaagcatcatgttccaaccaatcatcagagtctacaaaagtaatgtacgcccccccccgaacattcaatacctaggttacgagctgatgaaagaccgccgtttgctttctcaaaatatttgaaacgagaatctttctctacaaattcttcacatattttggatgaatgatctggagagccatcattgattaataaacactcaaaattttgatacgtctgattctgaatgctatccaaacacattcgcaaataattctcaacgttgtagattggaactacaatactaattagttcgtctgccataaacttattctcctataaattgtctaatagcctctaccattttgtttggttcggttgaagaaaatatattagtttgattgcctatatcatgactagtattttcaaaggtaaaaattggtttagatagttgttgaacaacggatacaatattatccacttctttataatgattaatatctaaataaaaatctaaattatccaaaatttttcgataatcaaatggagaaaaacaaggataaatcgtaacattgctatatcttaataaagcaacgacactagacgcaaaatatgtatgtgctagtatagaaaaatgtacctctggtaaattttctatcaaatattctacatgctccatctcacaactagctgtaaaaattgctgtatgagctttaggactgtatacaagttcttcgaaactacgactaataatgtcttttctcaataaaatatcagaccattctaacagattataaaaccaccaaacttctctaaagcgattattggaaattatttcccaaggttttaccccagtataatgtataacactaggtaaatctccatttttcaactcagaaatctcataccatttatgatttccttctatgtgtgcgacgctatccatccccaccataaaattaaaatttcggtctaatcttttccatctatcatggaataacatatttaaaattccttgatctccatatgctgtttcatgatattgattggtcagttctaacagtttcgaacaagcatcttcatctctccaagtatctacattaactaataacattccggagttaaaattggtagaaggaacatcaccaaaagaatcttctactgctgccaaggcataaccatctagttctatatcaaataaatagtctaaacttcctgtaacaatgatgtcagaatctaggtataaagcacgactttctttgacaaaattaggtataaaataacgaaagaaagtggcataacttaaattctttaacggtaaatgaaactttttaagaacatgatctacaatctttacattaacgatttcagattgtatagtcttcaatcgcttattcatcatcaaaaaccactctgacgcaatatcatcattaaatacataaaattttaaacaattattataacaacaaatagatttaattgcagtttctaatttatctacataatcattatctgcattaaaaactatagattttgtattcattaacataatttccttataataaatttcgtatcaaacagctataatatagaatcattttcacctaaaaagataattaatcacaccctaatattgtactgaccccaaaaagttagattttttctgtctaacttttggggtgcagttcatattaaatatctttaggtctatttatattttataaagcactctgatgtttgaacaactttcatatatgatgaacggagaaattttataaaaaataatccaactcttcaatctgatcactaaccgtcaaaatcagagcatctcctactaaatgatttttcttcatttgcttatttctctcaatttttcaatcattgcttgaacttggtcaacagcatatgcctcctgacctacttcataggttttagtattttcaaaggataagataggcttgccaagattagcaaattgatcgagaatttcttctgtcttttcgccatgattaatatctaaaagtacttgactggtttctaccaattcattatcgacatctaccaaatagtgaattccgttaaatatagtcacgtttggataaattgtcatctgagccaatcgatcactaactattactctagctgctatcttaaactgaatatcaggcaaggattgaaccaatgtctcaatttgttcaatatggtctgaggcagtatagattagacaagtgaaaggttcctttattggatagatgtgagatctttgtaatggatgtaaatgatggttttgtcccaattctgtccattcaagcccatgatagtaccaccaaacttcacgataggtttgggccgccaaatctttccacggtttccgatgagaaagatagtgaataatagcaggataatcctgaccctcaggcaattgataatcagcaaactgtttatgaatgacaatatgattataatcaaagtccaattccaaccatttatgttcaaaaagcatattcaagatgctctgatctgcctgatccaccttatcatgccattcattggttacatcaattaatttttgggtcatattctcttttttccaaaaagcattgtttaccaagagaacaccggcattaaagatttcttgaccaaaataagctctgcccccaaaatctctaacagcagccaaaggataatcttgtaagtctgtagcaaacaagtcatccagatttttcgttacaactagatcacagtccaagtagagggccttgtcttcttgcacgaaatcagctatgaaatagcgtaaaaagactgtgtaactaatatccgatttataacatgaaatttgctcagaagttacccgacaattaataatttctgagtcaaacttctctaagcgcttatttaattgcttaatccattcatttggaaaatcgctatgaatcagataaaaacgaatcgaacgattatgataacaaatagacttgattgtcgttaaaacttggtctacatagccatagtttgctgcgaggacaatggctttcttttcactttcctcttgtctcgatagctgatttaaaagcctttgtttcatttcaaactctttatacgttgctgtgtcagataaaccactagcttgaccgttggcgagactgacttccaacatctgacgataaactgccaagtgtttctctagaggataacccatattagctagtagcgtaatacgttcagacatagcatcaactaaagcgtgcatccacttttctgtccaaactcttgataaactaccttttctaatccgataagcataaagacttttatttaaataaattaccttttctgataataaatataccttttgattgaggtaaccatcttctcctaatttacctatgtcaaagcgcaactgctcaaacaatcttgccttatagagtttaccccaagcagatatcaaagcaaaactcttcatttcttgagtttcatacaagttctcaaagatagaaacattatcatatactttctcataataggagtctcccaatatatgaaagtagaacattccttcactttcgttgaaagaataataattaccaactgcaatatcagcctgatactctactatttttttatatagagtttctacataatcttgctcaatccaatcatccgagtccacaaaggtcacataatttccggacatattattcagaccggtgtttcgtgcggcagaaagaccagcattttcttgttctatatagagaattcggtgatccatttctgaaaattctttacaaatttcacctgaagcatccgtagaaccatcattaacgacaacaatctcaatatttttatatgtttgagtaataatactatctaggcacttcctcagatagttttccacattgtatactggtacaatgactgttattttatcatccactagcaattttctccttgatttatgtgcgcgagttagtttagcctaactttacaggttgtcttactcttcttcatcacgtttacggcgtttcgcaaccaatccaatacctgtaacagctgctagaactccaagtaacacagatccaattgacgactcagtacctgtattaggcaattctttttgggatttacctgtcgatccagaagtatttccaacttgtgagttcgaatggtttgctgaatttgaaactgatgtacttgctgaagctgacgcacttgttgatgctgaagctgaagcactggtgcttgctgaggccgaggcactggtgcttgctgaagccgacgcactcgttgatgctgaagctgacgcacttgttgaggccgaagctgaagcacttgttgatgctgaggctgacgcactggtacttgctgaagctgaggcactggtgcttgctgaggctgaggcgctggtacttgctgaggctgacgcactggtgcttgctgaagctgaggcgctggtacttgctgaagccgatgcactcgttgatgctgaggctgatgcactagtacttgctgaggctgacgcactcgttgatgccgattcagacgctgagatacttgctgaggctgaggcactggttgatgctgaagccgacgcactggtgcttgctgaagccgatgcactagtacttgctgaggctgacgcactcgttgatgccgattcagacgctgagatacttgctgaggctgaggcactcgttgatgctgaagccgacgcactggtgcttgctgagactgatgcactggttgacgctgaagccgatgcactcgttgatgctgatgctgatgcactcgttgatgccgattcagacgctgagatacttgctgaggctgatgcactggttgatgctgatgctgatgcactagtacttgctgaggctgacgcactcgttgatgctgatgctgaggcacttgttgatgccgaagccgaagcactggttgatgctgaagctgacgcacttgtgcttgctgaagctgacgcactggtacttgctgaagccgaggcactggttgacgctgaggctgaagcacttgttgaggctgaagctgatgcactggttgatgctgaggctgaagcacttgtacttgctgaggccgaggcgcttgttgatgcggaagctgacgcactggttgatgcagattcagaagctgatgtgcttgctgaggctgacgcactcgttgatgctgactcagacgcactcgttgacgctgaagccgaagcactggtgcttgctgaagccgaggcacttgttgatgcggattcagaggcactggttgacgctgagactgaagcactcgttgatgctgaagccgacgcactggtacttgctgaagctgaagcacttgttgatgctgaagctgatgcactcgttgatgctgaagccgacgcacttgttgatgctgattcagacgctgaggtacttgctgaagccgacgcacttgtcgacgctgaggctgacgcactggtacttgctgaagctgaggcgcttgtcgacgctgaggctgaggcgctagtacttgctgaagctgatgcactagtacttgctgaagcggacgcactcgttgatgctgaggctgaggcgctagtacttgctgaggctgacgcactggttgatgccgattcagatgcactggttgaggccgacgcacttgtcgacgctgaggctgaagcactggtacttgctgaggctgacgcactggtacttgctgaagctgaggcgcttgtcgatgctgaggctgacgcactggttgatgcagattcagaagctgatgtgcttgctgaggctgacgtactcgttgatgctgactcagacgcactcgttgacgctgaagccgaagcacttgttgacgctgatgctgaggcgctagtacttgctgaagcggacgcactcgttgatgccgattcagacgctgagatacttgctgaagctgaagcacttgttgatgctgaagctgatgcactcgttgatgctgattcagacgctgaggtacttgctgaagccgacgcacttgtcgacgctgaggctgacgcactggtacttgctgaagctgaggcactggtgcttgctgaggctgaggcgctggtacttgctgaggctgacgcactggtgcttgctgaagctgaggcgctggtacttgctgaagccgatgcactcgttgatgctgatgctgatgcactagtacttgctgaggctgacgcactcgttgatgccgattcagacgctgagatacttgctgaggctgaggcactggttgatgctgaagccgacgcactggtgcttgctgaagccgatgcactagtacttgctgaggctgacgcactcgttgatgccgattcagacgctgagatacttgctgaggctgaggcactcgttgatgctgaagccgacgcactggtgcttgctgagactgatgcactggttgacgctgaagccgatgcactcgttgatgctgatgctgatgcactcgttgatgccgattcagacgctgagatacttgctgaggctgatgcactggttgatgctgatgctgatgcactagtacttgctgaggctgacgcactcgttgatgctgatgctgaggcacttgttgatgccgaagccgaagcactggttgatgctgaagctgacgcacttgtgcttgctgaagctgacgcactggtacttgctgaagccgaggcactggttgacgctgaggctgaagcacttgttgaggctgaagctgatgcactggttgatgctgaggctgaagcacttgtacttgctgaggccgaggcgcttgttgatgcggaagctgacgcactggttgatgcagattcagaagctgatgtgcttgctgaggctgacgcactcgttgatgctgactcagacgcactcgttgacgctgaagccgaagcactggtgcttgctgaagccgaggcacttgttgatgcggattcagaggcactggttgacgctgagactgaagcactcgttgatgctgaagccgacgcactggtacttgctgaagctgaagcacttgttgatgctgaagctgatgcactcgttgatgctgaagccgacgcacttgttgatgctgattcagacgctgaggtacttgctgaagccgacgcacttgtcgacgctgaggctgacgcactggtacttgctgaagctgaggcgcttgtcgacgctgaggctgaggcgctagtacttgctgaagctgatgcactagtacttgctgaagcggacgcactcgttgatgctgaggctgaggcgctagtacttgctgaggctgacgcactggttgatgccgattcagatgcactggttgaggccgacgcacttgtcgacgctgaggctgaagcactggtacttgctgaggctgacgcactggtacttgctgaagctgaggcgcttgtcgatgctgaggctgacgcactggttgatgcagattcagaagctgatgtgcttgctgaggctgacgtactcgttgatgctgactcagacgcactcgttgacgctgaagccgaagcacttgttgacgctgatgctgaggcgctagtacttgctgaagcggacgcactcgttgatgccgattcagacgctgagatacttgctgaggctgaagcacttgtgcttgctgaagccgaggcacttgttgatgctgattcagatgctgaggtacttgctgaagctgaggcactggttgatgcggattcagacgcgctggtgcttgctgaggccgacgcactggtgcttgctgagactgatgcactcgttgatgctgaagccgaggcacttgttgatgccgattcagacgctgagatacttgctgaggccgaggcgctggttgacgcggaagctgaagcacttgttgacgctgaggctgaggcgctagtacttgctgaagccgaggcacttgttgatgcggaagctgacgcactggtacttgctgactctgatgcactggttgatgctgaagccgatgcactcgttgatgctgaagctgatgcactagtacttgctgaggctgacgcactggttgatgccgattcagatgcactggttgaggccgacgcacttgtcgacgctgaggctgacgcactggtacttgctgaggctgacgcactggtacttgctgaagccgacgcacttgtcgacgctgaggctgacgcactggtacttgctgaagctgaggcgcttgtcgatgctgaggctgacgcactggttgatgcagattcagaagctgatgtgcttgctgaggctgacgcactcgttgatgctgactcagacgcactcgttgacgctgaagccgatgcacttgttgacgctgaggctgaggcgctagtacttgctgaagcggacgcactcgttgatgctgaagccgatgcacttgttgacgctgaggctgaggcgctagtacttgctgaagcggacgcactcgttgatgccgattcagacgcactcgttgacgctgaagccgatgcacttgttgacgctgaggctgaggcgctagtacttgctgaagcggacgcactcgttgatgccgattcagacgctgagatacttgctgaggctgacgcactggttgaggctgaggctgaggcgctagtacttgctgaagccgacgcactggtgcttgctgaagccgaggcacttgttgatgcggaagctgacgcactggtacttgctgactctgatgcactggttgacgccgaagccgatgcactcgttgatgctgaagctgatgcactagtacttgctgaggctgacgcacttgtcgacgctgaggctgacgcactggtacttgctgaagctgaggcgcttgtcgacgctgattcagatgctgatgtgcttgctgaagccgaggcacttgtcgatgctgaggctgaagcacttgttgatgctgagactgaagcactggtacttgctgaagctgacgcactggttgacgctgaagccgaggcactggttgatgctgaagccgatgcactagtacttgctgaggctgacgcactggttgatgccgattcagatgcactggttgaggccgacgcacttgtcgacgctgaggctgaagcactggtacttgctgaagctgaggcgcttgtcgatgctgaggctgacgcactggttgaggccgattcagaagctgaggtgcttgctgaggctgacgtactcgttgatgctgactcagacgcactcgttgatgccgattcagacgctgagatacttgctgaggctgacgcacttgttgatgctgaggctgaagcactggttgacgctgaagctgacgtactcgttgatgctgaacccgaggcgcttgtgcttgctgaagccgaagcactcgttgatgctgaggctgaggcgctggttgaggccgattcagaagctgaggtgcttgctgaggccgaggcgctggttgaggccgattcagaagctgaggtgcttgctgaggccgaggcgctggttgatgctgaagctgaagcactggtacttgctgaagccgaagcactggttgacgctgattcagatgctgatgtgcttgctgaagccgaggcacttgttgatgcggaagctgacgcactggtacttgctgactctgatgcactggttgacgccgaagccgatgcactcgttgatgctgaagctgatgcactagtacttgctgaggctgacgcactggttgatgccgattcagatgcactggttgaggccgacgcacttgtcgacgctgattcagatgctgatgtgcttgctgaagccgaggcacttgtcgatgctgaggctgaagcacttgttgatgctgagactgaagcactggtacttgctgaagctgacgcactggttgacgctgaagccgaggcactggttgatgctgaagccgatgcactcgttgatgctgaagctgatgcactagtacttgctgaggctgacgcactggttgatgccgattcagatgcactggttgaggccgacgcacttgtcgacgctgaggctgaagcactggtacttgctgaagctgaggcgcttgtcgatgctgaggctgacgcactggttgatgccgattcagaagctgatgtgcttgctgaggctgacgtactcgttgatgctgactcagacgcactcgttgatgccgattcagacgctgagatacttgctgaggctgacgcacttgtgcttgctgaagccgacgcactggttgaggcggaagctgacgctgaggtacttgcgcttgctgaggccgacgcactcgttgatgccgattcagacgctgagatacttgctgaggctgacgcacttgtgcttgctgaagcggacgcactggttgaggcggaagctgacgctgaggtacttgcgcttgctgaggccgacgcactcgttgatgctgaagccgaagcacttgtcgacgctgaagccgacgcactggttgacgctgaagcggacgcactggttgatgcagattcagaagctgatgtgcttgctgaggctgacgcactcgttgatgctgaagccgaagcactcgttgatgccgattcagacgcacttgtcgatgctgaagccgatgcactagtacttgctgaagccgacgcactggtgcttgctgaagccgaggcacttgttgatgctgattcagaggcactggttgacgctgagactgaagcactcgttgatgctgaagccgacgcactggtacttgctgaagctgaagcacttgttgatgctgaagctgatgcactcgttgatgctgattcagacgctgaggtacttgctgaagccgacgcacttgtcgacgctgaggctgacgcactggtacttgctgaagctgaggcactggtgcttgctgaggctgaggcgctggtacttgctgaggctgacgcactggtgcttgctgaagctgaggcgctggtacttgctgaagccgatgcactcgttgatgctgatgctgatgcactagtacttgctgaagcggacgcactcgttgatgctgaggctgaggcgctagtacttgctgaggctgacgcactggttgatgccgattcagatgcactggttgaggccgacgcacttgtcgacgctgaggctgaagcactggtacttgctgaggctgacgcactggtacttgctgaagctgaggcgcttgtcgatgctgaggctgacgcactggttgatgcagattcagaagctgatgtgcttgctgaggctgacgtactcgttgatgctgactcagacgcactcgttgacgctgaagccgaagcacttgttgacgctgatgctgaggcgctagtacttgctgaagcggacgcactcgttgatgccgattcagacgctgagatacttgctgaggctgaagcacttgtgcttgctgaagccgatgcacttgttgatgctgattcagatgctgaggtacttgctgaagctgaggcactggttgatgcggattcagacgcgctggtgcttgctgaggccgacgcactggtgcttgctgagactgatgcactcgttgatgctgaagccgaggcacttgttgatgccgattcagacgctgagatacttgctgaggccgaggcgctggttgacgcggaagctgaagcacttgttgacgctgaggctgaggcgctagtacttgctgaagccgaggcacttgttgatgcggaagctgacgcactggtacttgctgactctgatgcactggttgatgctgaagccgatgcactcgttgatgctgaagctgatgcactagtacttgctgaggctgacgcactggttgatgccgattcagatgcactggttgaggccgacgcacttgtcgacgctgaggctgacgcactggtacttgctgaggctgacgcactggtacttgctgaagccgacgcacttgtcgacgctgaggctgacgcactggtacttgctgaagctgaggcgcttgtcgatgctgaggctgacgcactggttgatgcagattcagaagctgatgtgcttgctgaggctgacgcactcgttgatgctgactcagacgcactcgttgacgctgaagccgatgcacttgttgacgctgaggctgaggcgctagtacttgctgaagcggacgcactcgttgatgctgaagccgatgcacttgttgacgctgaggctgaggcgctagtacttgctgaagcggacgcactcgttgatgccgattcagacgcactcgttgacgctgaagccgatgcacttgttgacgctgaggctgaggcgctagtacttgctgaagcggacgcactcgttgatgccgattcagacgctgagatacttgctgaggctgacgcactggttgaggctgaggctgaggcgctagtacttgctgaagccgacgcactggtgcttgctgaagccgaggcacttgttgatgcggaagctgacgcactggtacttgctgactctgatgcactggttgacgccgaagccgatgcactcgttgatgctgaagctgatgcactagtacttgctgaggctgacgcacttgtcgacgctgaggctgacgcactggtacttgctgaagctgaggcgcttgtcgacgctgattcagatgctgatgtgcttgctgaagccgaggcacttgtcgatgctgaggctgaagcacttgttgatgctgagactgaagcactggtacttgctgaagctgacgcactggttgacgctgaagccgaggcactggttgatgctgaagccgatgcactcgttgatgctgaagctgatgcactagtacttgctgaggctgacgcactggttgatgccgattcagatgcactggttgaggccgacgcacttgtcgacgctgaggctgaagcactggtacttgctgaagctgaggcgcttgtcgatgctgaggctgacgcactggttgatgcagattcagaagctgatgtgcttgctgaggctgacgtactcgttgatgctgactcagacgcactcgttgatgccgattcagacgctgagatacttgctgaggctgacgcacttgtgcttgctgaagccgacgcactggttgaggcggaagctgacgctgaggtacttgcgcttgctgaggccgacgcactcgttgatgctgaagccgaagcacttgtcgacgctgaagccgacgcactggttgacgctgaagcggacgcactggttgatgcagattcagaagctgatgtgcttgctgaggctgacgcactcgttgatgctgaagccgaagcactcgttgatgccgattcagacgcacttgtcgatgctgaagccgatgcactagtacttgctgaagccgacgcactggtgcttgctgaagccgaggcacttgttgatgctgattcagaggcactggttgacgctgagactgaagcactcgttgatgctgaagccgacgcactggtacttgctgaagctgaagcacttgttgatgctgaagctgatgcactcgttgatgctgattcagacgctgaggtacttgctgaagccgacgcacttgtcgacgctgaggctgacgcactggtacttgctgaagctgaggcactggtgcttgctgaggctgaggcgctggtacttgctgaggctgacgcactggtgcttgctgaagctgaggcgctggtacttgctgaagccgatgcactcgttgatgctgatgctgatgcactagtacttgctgaggctgacgcactcgttgatgccgattcagacgctgagatacttgctgaggctgaggcactggttgatgctgaagccgacgcactggtgcttgctgaagccgatgcactagtacttgctgaggctgacgcactcgttgatgccgattcagacgctgagatacttgctgaggctgaggcactcgttgatgctgaagccgacgcactggtgcttgctgagactgatgcactggttgacgctgaagccgatgcactcgttgatgctgatgctgatgcactcgttgatgccgattcagacgctgagatacttgctgaggctgatgcactggttgatgctgatgctgatgcactagtacttgctgaggctgacgcactcgttgatgctgatgctgaggcacttgttgatgccgaagccgaagcactggttgatgctgaagctgacgcacttgtgcttgctgaagctgacgcactggtacttgctgaagccgaggcactggttgacgctgaggctgaagcacttgttgaggctgaagctgatgcactggttgatgctgaggctgaagcacttgtacttgctgaggccgaggcgcttgttgatgcggaagctgacgcactggttgatgcagattcagaagctgatgtgcttgctgaggctgacgcactcgttgatgctgactcagacgcactcgttgacgctgaagccgaagcactggtgcttgctgaagccgaggcacttgttgatgcggattcagaggcactggttgacgctgagactgaagcactcgttgatgctgaagccgacgcactggtacttgctgaagctgaagcacttgttgatgctgaagctgatgcactcgttgatgctgaagccgacgcacttgttgatgctgattcagacgctgaggtacttgctgaagccgacgcacttgtcgacgctgaggctgacgcactggtacttgctgaagctgaggcgcttgtcgacgctgaggctgaggcgctagtacttgctgaagctgatgcactagtacttgctgaagcggacgcactcgttgatgctgaggctgaggcgctagtacttgctgaggctgacgcactggttgatgccgattcagatgcactggttgaggccgacgcacttgtcgacgctgaggctgaagcactggtacttgctgaggctgacgcactggtacttgctgaagctgaggcgcttgtcgatgctgaggctgacgcactggttgatgcagattcagaagctgatgtgcttgctgaggctgacgtactcgttgatgctgactcagacgcactcgttgacgctgaagccgaagcacttgttgacgctgatgctgaggcgctagtacttgctgaagcggacgcactcgttgatgccgattcagacgctgagatacttgctgaggctgaagcacttgtgcttgctgaagccgaggcacttgttgatgctgattcagatgctgaggtacttgctgaagctgaggcactggttgatgcggattcagacgcgctggtgcttgctgaggccgacgcactggtgcttgctgagactgatgcactcgttgatgctgaagccgaggcacttgttgatgccgattcagacgctgagatacttgctgaggccgaggcgctggttgacgcggaagctgaagcacttgttgacgctgaggctgaggcgctagtacttgctgaagccgaggcacttgttgatgcggaagctgacgcactggtacttgctgactctgatgcactggttgatgctgaagccgatgcactcgttgatgctgaagctgatgcactagtacttgctgaggctgacgcactggttgatgccgattcagatgcactggttgaggccgacgcacttgtcgacgctgaggctgacgcactggtacttgctgaggctgacgcactggtacttgctgaagccgacgcacttgtcgacgctgaggctgacgcactggtacttgctgaagctgaggcgcttgtcgatgctgaggctgacgcactggttgatgcagattcagaagctgatgtgcttgctgaggctgacgcactcgttgatgctgactcagacgcactcgttgacgctgaagccgatgcacttgttgacgctgaggctgaggcgctagtacttgctgaagcggacgcactcgttgatgctgaagccgatgcacttgttgacgctgaggctgaggcgctagtacttgctgaagcggacgcactcgttgatgccgattcagacgcactcgttgacgctgaagccgatgcacttgttgacgctgaggctgaggcgctagtacttgctgaagcggacgcactcgttgatgccgattcagacgctgagatacttgctgaggctgacgcactggttgaggctgaggctgaggcgctagtacttgctgaagccgacgcactggtgcttgctgaagccgaggcacttgttgatgcggaagctgacgcactggtacttgctgactctgatgcactggttgacgccgaagccgatgcactcgttgatgctgaagctgatgcactagtacttgctgaggctgacgcacttgtcgacgctgaggctgacgcactggtacttgctgaagctgaggcgcttgtcgacgctgattcagatgctgatgtgcttgctgaagccgaggcacttgtcgatgctgaggctgaagcacttgttgatgctgagactgaagcactggtacttgctgaagctgacgcactggttgacgctgaagccgaggcactggttgatgctgaagccgatgcactagtacttgctgaggctgacgcactggttgatgccgattcagatgcactggttgaggccgacgcacttgtcgacgctgaggctgaagcactggtacttgctgaagctgaggcgcttgtcgatgctgaggctgacgcactggttgaggccgattcagaagctgaggtgcttgctgaggctgacgtactcgttgatgctgactcagacgcactcgttgatgccgattcagacgctgagatacttgctgaggctgacgcacttgttgatgctgaggctgaagcactggttgacgctgaagctgacgtactcgttgatgctgaacccgaggcgcttgtgcttgctgaagccgaagcactcgttgatgctgaggctgaggcgctggttgaggccgattcagaagctgaggtgcttgctgaggccgaggcgctggttgaggccgattcagaagctgaggtgcttgctgaggccgaggcgctggttgatgctgaagctgaagcactggtacttgctgaagccgaagcactggttgacgctgattcagatgctgatgtgcttgctgaagccgaggcacttgtcgatgctgaggctgaagcacttgttgatgctgagactgaagcactggtacttgctgaagctgacgcactggttgacgctgaagccgaggcactggttgatgctgaagccgacgcacttgttgatgctgaagctgaggcgctttgactagcacttactgagagtgacttagactgtgaaagtgactgactggtcgtgctagattcaactacctttcctccaccattgaagtagttaattccaattctatctgttctagcagcgtaaggggtaaatgtaaaggatgtatccgttccagtaattggtacagtccaagatgatgttaatccatatcctttcttagcaaagaaaccattcatttgggcaccatttccccaagtatacccactaccctgcgtcgtcattgtagatgtattataggatagaacctgtctaccatttttgtcagtaatgtagttctttacacctgaaggtttaccaagatcactgccaagggttaacattgtttgtgttgaagtacctgaattatagatagaatatccaggacgcatacttgatatattaccaagatcatttgttttaggattcacatacgtaaccgtataggtaaaggtcaattttgaaccatcatttgtcactttcaatttatagtaaattggaacacgatataccgaatctacaccttcacctgtataaacttttgtctcacttttagcaatgtttagacttgcattaattgcaggggcgccatttacaatcgtattgccagaaaaaacagcagcattttttatagaagccagcaattgctcgatggaatccactgaacgcttgcgtcgcttagcataagattggagattgacatttgtaactgatgctacataatcactagctggtttcttacgatcttcttcgaccttcttagcagttgcttctgtagcggcagctgtttgtgaacctaccacagtagatgatgcagaaatacttgtcgaagccgatgtacttgctgattctgatgcacttgtacttgctgaggtcgaagcgctggttgaggctgactcagatgcagatgtacttgccgactctgaagctgacaaactagttgaactcgctgaattacttgtagatatcgtacctagaactactgtatcatttgttgccaaagcatccgttttctctacagttttttcaagtactgctgactcatttgtaaataccttcgtttgagttgcaacggttccacttatgacagctcccgcagcaactatccccttgaggatatcaagcccagtaattgaatgacttactttatcttctaccgtttcggtcatgacctgagtagtatcaacaccacctcgcaagaccttaaacaagccaaaaagagaagtcgaggcccgtagccaatgcttccctgatttgattaatttgaaccgagttactcggtctgtttctctatattcacccttctgacgtctaaaaaatattttgaaatttcctttcgagtattattttcatgtatggatataaataaattaccatactataattatagaatagggaacccaaaatagcaagaaacttgaggtatttttgctaaaaaaaaaaagcattttactattttgtatatatatatatatatattataagataagttttttataaagacacgcaaatgagtataaatcagctaatttttggtttatattcctatttttatgcataattattctttcattctctaatttgtgaatcaatatatctgattagaaaactaccattgagtttttgctccacctcattagtccgctcaaaacgccgtccgctaatcttgccatagactttctcccctctaggagcccctgcataaggacgatagaggtagcggtcgattcccgtttcgtcaatatataggactggtaaatcttttaggttatccaaaatatcaagaaactcagaaactttctcaggcttttgttccctaaaactggtcgtcttttttaaaatgaccttaatctgctttaaaactgcccatacggagggcaaagcacaatcaaaacgggccgcaatttcccgtaaaaaagcgtctggatgagcctctacaaaggctttcaattcttctaaagggatcttacgctttttgacgactcgctttttccgctctaagttcccttgtttacgtctttcttttcccacgtgaagagagttctgacgccgacatcaaaaactttggccgcctcgacatgtctgtgccctcctttaatggaatctaatgctccttgtttaaaatcagtactatatgcatagctttattagaccatgcttattttaaactaagcaactatagatagagaaatgaaataaaatctgaattcgaatgtgataaggagttagaaattgaaacaataggattcccccattattcacacaaaaataaaaccactaaaaaacagagcttgccagcattcttgaaaagtagtataattattgcatgcgcaatcatcttgtgacgcagagactgcccgttaatggactttcttctatttatgactctaaaaagaaaggagacactatgacctatttggaaaaatggtttgacttcaatcggcgtcagaaagaaattgaaagtctcttggaagagaccattgcccaacagagcgagcaaagtctgaccttgaaagagttctacctgctctactatctggacttggctgaagaaaaatctctacgccagattgacctgccagataagcttcatctgagcccgagcgcagtttctaggatggtggctcgcttggaagctaaaaattgcggtctactcagtcgcatgtgttgccatcaagatagacgctctagttttatctgcctgacaaatgatgggcaaaagacactggcctcgctacaaaagactgtcgaagaaagcttggaagcaggtttggatttcttgatttaagatgattttaaaaaaagttgcgtgcgcaatcatttttcttgacattctcttttataaggagtaaaataaagttagcattaaacaaaggagttttaaacatgattgaaattacctatatagatgccagcaagaacgaaagaactgtgactttcgagtcttatgaagactttgaacgttcgcaacaagcttgccttatcggcgtcgcagactactaccctgtccaaaaattaacttacaagggtcataatttggactaccatgggacttatggagatatcttcttctatctcatgaaacaagatttaagccaatataactaaaaaaaggagaaatacaatggcaaaagcaattacagatgcaacattcgaacaagaaacaaaagacggtttggtcttagtagacttctgggcaacttggtgtggtccatgtcgtatgcaaggtccaatcttggacaaattgtctgaagaactttcagaagatgtcttgaaaatcgttaaaatggacgttgatgaaaatccaaacacagctcgtgcttttggaatcatgtctattccaactcttctcttcaaaaaagacggccaagttgtcaaacaagttgcaggtgttcacacagcagaacaaatcaaggccatcattgctgaattgagctaatcaaacgagagaccaagtactttctttggtctcttttttcttgccctttgccatttttcaaaaaatatgctagactatagtagattgaaactagaatagtacacctctacttctaaaacattgttagaaatcgatttgactgtcctgatcgatttgtcctgttcttatttcattttactatataagtagaatattacgatgtttgggatatgccatcgctaaaaaaacctcgatttggtattttttagctccctaatgggagctttttgcgtgctctgaacatttcccattttggaaggagtactatgaaacgtcaattagccttggtcgtctttagtggtggtcaagattcaacaacctgccttttctgggcatgcaacactatgaaacagtcgaagctgtcacctttgcctacggccaacgtcatcacctcgaaattcaaattactagagaaatcgctaaggaacagggcattcgtcaccatatcctcgatatgtctctgctgggacaaatcactgctcagccagactttgcgacgattcatatttcctacattcctgacaagctctgtgtcgagtcaaaatccctcaaactatatctatttagctaccgaaaccacggagatttccacgaaaactgtatcaacaccatcgggaaagacttggtcaacttgctagaccctcgctatttagaagtctggggaaaattcactccgcgcggtggcatttcaatcgacccctactacaactacggtaagcaaggaactaagtatgagggcttggcagaacaacgcctcttccaacacgacctttatccagagaaaattgacaaccgctaaagtcatactcaatgaaaatcaaagagcaaactaggaagttagccgcaggttgctcaaagcactgttttgaggttgtggatagaactgacgaagtcagatcaaaacactgttttgaggttgtggatagaactgacgaagtcagatcaaaacactgttttgaggttgtggatagaactgacgaagtcagcttaaaacactgttttgaggttgcagatagaactgacgaagtcagcttaaaacactgttttgaggttgcagatagaactgacgaagtcagcttaaaacactgttttgaggttgcagatagaactgacgaagtcagcttaaaacactgttttgaggttgcagatagaactgacgaagtcagatcaaaacactgttttgaggttgtggatagaactgacgaagtcagtaaccatactacggcaagatgaagctgacgtggtttgaagagattttcgaagagtatcatacgaaaaagccctgttcctcaagatgaggagcaaggctttttgagtttcaattattcttctgttccaaggaaattttttgcaacaagggctgcaagaactccaccagcgattggtgcaaggatgaaaatccaaacttgttgaagggctgcgccgcctaccaagacagctggtgccaagctacgagctgggtttactgaaagtccagtaatcttcaatccgacaagaatcatcgccatcaatgacaaaccgattaccaaaccagcaatcgcgccattgcccttgctttctgaagtcacagtcatgataaccaatacaaacaagaaagttgcgatgacttcaaacaagaaaccaccaaagacagtgacaccgtttgccaaggcattttcaccaagactagcagttgacatacctgagttagccaagaggaagaagacagcgccagaagcgatgaaagctccaacaacctgaccaaggatgtagtttacaagttctgaagatgacaaacgtttgtttacaaacatagcaatcgaaacagccgggttcaagtgagcacctgaaacagttccgattgagtaggctgccaccacgattgccaaaccaaaggcaaaggcgattccaaggtgaccaaggccatcaagaccatttccaaaaacaacagctcctgtcccgacgaatacaaacatgaacgtaccgattaactcagcaacaaattttttcattttctttctccttttttcaaaaactagatactagtctatcaaaagtaggaaagggtttcaagaaaattgattggaaattttttgaaaatcatagaactattagctaatccctagtattgaaaagactggatagcttctttcaggtcatcttgtaaactatttctctggtcaagttggacatagacttccaccagacaggatctaaagttggaaaatttgtaaaaatcctccctttcttctatcggaaaatcaacagtttttatccaagaagctacttgttcttgctccaacttcccttgtaaaataggttcatagatcactcttgctaaacgccaatcctcatcatctgtaaagcgaatcgacattcttttaaatagttggccaagtatatcaaatacttcatgaactctgtttttaggaaagtctggatgacaaaccacctctgtcagtaaatcggctccatgtgcaaaagcgtgaacccaaccatactgacttgagaaaccccttgtatccttttcttttgaaagatagtgcaagccttgatttaaaaggacattacgaatttctggagaaggatttcccaaatgatcaaacaaccactggatttcttcctggttataatttggtttttcttctgctatttttcttagtaaatcttgatacatggtcaatacctctacatttctagcaactgttcaaaaaggcagtcttaaatgactcaatattgaattctcaattaaatacaatctgatataaaatgacgtaaataactatcaataccagttctacagtaagttcaaatttaacatcacgaccttcaacgacatttttgaaaatagctacaactaagacaaatagaatgacgcttaacaagcccataaacatcattctaaaaaatttttctattcccctactctcccaactcagcactataggagataatctggtcaactgtgtcagacaagaattggatggtatcacggagtggtttgtctgttgaaatatcagcaccgataatcatggctgactcaagtggtgtcttgctaccacctgatttgaggagattgagccagtcttcagctccagtttcagaatgttttagatgaaggtaaccagcagtcgagataactagtcctgctgagtaagtgtaactatacaagcccatatagtagtgagcttggcgcatccaagtcagagttgcatcatcgtcaatttcaatagcatctccccagaaatccgtcaaaacttccttcataatgctgttgagcttgcttgctccaaaggtctccccttcttcaatcaatgtatacaccttacgctggaaggcggcttccaagaggtgggtgataaagttatggaagtaggtgtctgtcaagcgatgagccagagcgaagcgtttttgacgtgggtcattagactggttctccaagtaatcactgagtagcaattcattgaaggttgacggtgcttcaacatagtaggtcgacatatgggcattgaagtaactttgatgattgtctgaaaagatgaattgaccagaatgcccgatttcatgaatcaaggtatagacatcgctcaaacggcctgtccagctcatgagtacataagggtgtacgcgatatgggtccgccgcataaccaccggaatccttgccactgttagcagcaaagtccacccagcgctcttcttggtaacgagcaacttcctgacaatattcttgccccaaaggttctaccgacttcatgaccaaatcataggcatcgtcaatagtcacttcaggattcagggcgctgtccaagtccaatttccagtctgcaaaggtcatcttttcaagaccatttaccttggcaacatgcttgaggtatctctgagcgactggtgcaaagtccttcatgatgaggtcaatctggcggtcaaacatgacacggtccacttcttgttcagctagaagatagtcaaagacagagtcgtatcccttcatatcagccaagagtttttcagacttgacctgagccagataggctgctgcagccgtattttggtgcttacgaagtccctctgagaaggaacggaaggatttctcacgaacctcagcatcctcatggttttggtagaaattctcataggtcacaaagctgtttttgtaggtcttgccatgggcttcaaagtcagccatttcaaaatccccagctcgcatcttagtataaatgtcctgcggactgtagaaaacttcaccgagatttgtcaaggccttctccacatctgcccctaagtagtgggcttttttgattttagcctgacgaatggcagctgttaaatgtggcaatttacccaaacggtccaagacttcctcatctgctgccaccaaggcatcgtcaaagaaggtcaaggctacgctggcatctgtttcaaattccatcccagcttgggcaatattggcaaattcgtcattgctatagtccgtcgtctgaggcataaaaccatagttgccaatatggctcatctgaatgtagatctgttccaattccgcaaaggccttctcgaaatcctcaaaagtgtgaagattgcccttgtaatcacggctaaactggttgatgtcttcgcgagctttctcgattgcacgcaagaaatcctcacggtcttggtatagggctgttaagtcccagagttccttctctggaaattctgaacggtgtttttgttccattttcttcctcttatttctctaattctactaaaacactaagggctgataaagcgtaaagcggtgctgtttctgctcgcaaaatacgaggacctaggcctgccaaaacggctcctttagcttcaaaactttcgatttctgcaggtgagagaccgccttctggaccaaagataaagagcagtttggctcctgtttcaagaccagtgactgcttgcagaagcgcagcggcttctccttctttagctgattcttcataggctactatgatagagtcaaactggtccagctgagctagaaaatctgcttttttctcgaaaagtttaatacttggtacaatattacgcttgctttgctcggctgctccaagggcaattttttctagtttttcaacttttttacccaatttcttgccatcccacttggcaactgaccagtctgcaggaaaggcccagatttggctagcccccagttcggttactttttgagcgatgaactccagcttgtctcccttgggaaatccagatgcgatggtcacttggactggtagttccacattgtcatttaattcttggaccaactcaaactgacgattttccatatccagcacgcgcgccaagcgcttgatgccatcatcaaagactaaggtaacctcatcctcttctttcaagcgcataacctgaaacatatgcttactggtttccttgtcctcgatagtgacaggagagatagcactgccttttacaaaatactgctgcatgctagcctccaatcacaccagagatatccttggttttcttaaagacacaggtattccattccccttgaaccatgtgagtttcgaggaaaaatccagctgactcagccgactggcgcaccatgtccaacttgtccttgataatgccactcatgatcaggtagccttcatcctttaccaagcgataagcatcgtctattagatgaatgaggatatccgccaagatattagccacaatcacatctgcctcaatttccacacccttaagcaaatctccagccgctacatggatattttccatgccagggttgagctcaatattttcctgagccacacgaaccgccacatcatccaggtcataggcgaaaatttctttagcccccagaagcgagctggcaatagagagaacccctgaaccagtccccacatctagcaccgtttcgccaccacgaagaacctgttccaaggcaaaaaggctcatcttggtagttgggtgggttccagtaccaaaagccatgccaggatccagcttgataatcatttcccccgcagtcgcctcatagtctgtccaagagggaacgatggtcaaatcatgagtgatacgagcaggttcatagtatttcttccagttgtctgcccagtcttcctcagccaaggcagtcgtacctatttttaactctcccaaatccataaaatctgtcaattctgctagacgagcctgcaaatccgcctcaaccactgtcacatccaccgtgtcagggtagtaggctgtcactacgatttcttcttgctgctccacctctgggaaaatctctccaaagcggtccacatttcccacatagtccatactgtcttcgattgcgactccttgcgctcccagctcaatcaagagattggaaaccaactcctctccctcacgcttcactgtaacttttaactcttgccatgtttccattattaataccaagcccgtaaaacacaaaaccaaaataggaaattctctgaagacgcttgtgtctaagagaagtttatctttttggcacagtgtttagggcgggttcagtttagaaatgtaactgaaccatcctttctaatcacttacttttaaataatcttttaatctctcttgcaactgaggcacaacttgactggaactaagaaattcctcaacattcatcagctgatagccctgtccttcatctccgaagatgatattgtcaaattgttcttgtcttagctgaccaaccataaagaccgatttcttgcctttaaaaattacgctaggataaatcttgctccaaagcagacagtcttcatctaaatgaattcccagttcctcataaacttcacgccgagcgcattcaaaagggctttcgtccccttcacggccaccacctggcagttcccacatattggcccagggaatacttgccttatcatcgcgtaagatagtcaaaagcttatccccacaaaacaaagcaatcttgcaacctgtgaaatcagaaatttctagttccatcttcagttccttctaacatttccttttccagctcggctaaccagttttcataatatcttttctcatccctcaacattcgactactatccattttctgtctagcaatcttgagagccttacgagttcgatctacatctttcttcacctttaattgataccaggcttgtatcacttgaagattggacagtttgagagacagaaacgatttgacctgtcgaatactagcatattgctccgcttgctcaaaatctccttccaacaaggcgatatgaagcagggatagttgggcaactgtctgcatcatcggagtagttgtcctctcaagtaatgcttgaaactgctgtttagctacttcttccttcccttccaaaatggaaacttcaccttgcatacctaatacaccatccgcaaaactccctcgtgcatcctcaggaactgcttgaacaaagtctttcaaatcatattcttgaggagctagcaaggtctgggcagaatgtctcaataccaggtaggcgtatttggtattttcagggtgttgtagtaattcccaaatttttgctccatcggtgatgtcgactggcaaaatgttatttaggaagaaagataaattaagaaaaatccaagtccctgcaaaataccagcttcttgtcaaaaatccaaacaatatcgccaataatatcaagccgagatgaaccatcaagcctcctgaaagcatcaggatgattctttgatcgctttcatcctcttttaaaccaatgtattgagcaccaacatttttcagaatggctgttctactaagatgaaacctgcctgactttttggtcaaaataaaatgtcctaatccaaaagccaccagccgatagcctgtcaagtagccacaaaaagcatgacccagctcatgaagaataaagattaaatacatgcttagaagagcgaaggcataaccaaaagtaaaggctaaaactgcggaataccccaactctgcaaatgcgattgttccacaagcaaaagctagcataataaagacaacagctagcacataaaccaaataagtcccaattttcttcataacacctccaaccaactcctagtatcttggataaggataaaattctcccttttccaagccaatttttccttcttcaaagacttcttggttccattccatgacaaattcctctgcttctgggtcttccaaaaagtccatgaggacatctagcccaacctcagcagtatctttaaggaaaagcgcaaaataagctaaaaattcacgggaaaatccttttttaggcaggtaaggaataacagtcaaatagtcttcctcattgactgttgacttggcaggattgtagaaaaggaccgcttcctcaaaaagaatgtcatctgatgaaacctctccgtcttcatccaccatctccacacctgcagcattttgcgcttccaatagaaaactcacttctaccgcatggttgcgtttgtcccagctaatctcaaagtcaaagggaaagttcttgtccaactcttcctctaaaatatctaaaaatccgtatgttgccattttgtcctctttctatgcgactctttaatcgccccgattgctcggaaatatgctaaaatagatactaccatcttaccacaaaattattttatgtcctaattataccatattacctcatttaaacccttggtatcagtgattttcttaaaagtctgatttcttcatttctcataaaaatcaatataaaaagccctcgaaagggctaataaatctataaaatcaataggcgagtaactagcacaagtggacgtgcttttttattgactattaccacgataccacgcttaatcttaggcttgaactttcttatctgcaatagcgtctgtcaaagtctgagaaaagttaagccccatttctcgtcccaacttatctgcccattttggtatggtcaaagtctttttaatgggttcctgacttcctaggtattctgatacatcaacagataccatagaaataaaagatttatcaaggtcataggttgacacgaaatcttcatcatctttaaaaggatcattatcaattaaagacaagctattgatatctgatggctgaggtaactctccatcactctctatcaaatctgcaacagttatccctagccactccgaccccatagccaaagcctcagaaatcccctctccttgtgtagctgagtattcaaaatctgggaaatggacaaaataagtcgcttctgttccgtctgtgtcgtcataataaaataaagctggatacgtaactaacatttcactacctccatatcaaaaagcagggactgaattttacaacccagcttgctttcttatccctctttcagtgtacttattcagctcaccatgaaggattgtgataggtctttccccttgcttttccattttaatatgggagcctttaccgcctctagtctttatccaaccatgggccgtaaggagtttaaccatctctttttgtgtcataggcatagcgcttttacctcctgacaacaccattataacacgtgttacacgtattgtaaaggagtgatacttattattctattatacataaaagcccctagatgtggttctaagggaagccaatttattcatacctatttttctaatgagtagtaaaaactgcttctttatcgagcaattcatcatctgtatagtcaattgtaaaagtatctcgatctaagacagattgaggcggagttgaatgaatcataggaacactgcgtactctatattttttatctccaatttttacaaactgatactcttcgaaaatcaaattcaaaccacgtcaacgtcgccttaccgtactcaagtacagcctgcggctagtttcctagtttgctctttgattttcattgagtatgattaactctcaagtcttcgaaatcaggattttcaacagttattacaaggaggcgatttactacttcaaaaacatcaattattctatttttcatattttttcaacccattattagaatgaacttcttggtaagcaaaatcaagtttagatttaatgttttcgtacaaatctaaaatctcttttggagtatcttcccggaagaaaagttttcttttccctgaaataacttgatcactaagaatccaatgacgaatttgttttgtaaaaatcaaaatttcctgacttggtagttccatcatttccattgcttatcacctctcttttcattatagttcatacaatgacattcagcaatattatttctcaagtcagcacttccacttctttaggctcaactatcctattttgagctttaaggaaaatcaaatctctcatgctgatacctctcctcattaaattaaatagtaaaaaagattctatctcactccctgattattacaaaaccattgaaatatcacaactaataggctagaatggacatagtaagatatagtagatgagtcattctactcaaatccacgttagaaaggactgctatgccagacaatctcgcgcttcgcatgcgccctaaaaccatcgaccaggtcatcggtcaggagcatctggtcggacctggaaaaatcatccgccgcatggtggaagccaaccgcttgtcctccatgattctatatggccctcctggaatcggcaaaaccagtattgcctctgccatcgctggaacgaccaagtatgcctttcgaactttcaatgcgacagttgatagtaaaaagcgactgcaagaaatctcggaagaagctaaattttctggtggtctcgtcctattactagacgaaattcatcgactagataagaccaagcaagacttcctcttgcctctcttggaaagtggactggtcatcatgattggagcaacgactgaaaatcctttcttctctgtcactcctgccattcgtagccgagttcaaattttcgagttggaacctctgtctaaccaagacgtcaaagaggccctgcagatagctctaagtaaccctgaacgtggttttgattttccaatagaactagatgaggatgcgctggatttcatcgcaacctctacaaacggagaccttcgctctgcctttaactcactggacttagctgttctctctacccctgagaatgacgagggcattcgccacatcaccttagacatcatggaaaatagtcttcagagaagctacatcactatggacaaggatggagacggtcactatgatgttctatctgccctgcaaaagtctattcgtggctcagatgtggatgccagtctccactatactgcccgcttgattgaggctggggatctgcctagtctcgctcgtcgcttgactgttatcgcctatgaagatatcggcttagccaatcctgaggcccagattcataccgtgactgctctggatgctgcccagaagattgggttcccagaagcccgcattctcatcgccaatgtcgtgattgatttggccctttctccaaaatccaactcagcctatgtagctatggataaggcacttgctgacctcaaaacatcagggcacttgcctattccgcgacacctgcgtgatgggcactacagtggaagcaaggaactggggaatgcccaagactatctctatccacacaactatcctggaaattgggtcaagcaagactatctgccagaaaaaattcgtaatcatcactatttccaagcagaagatactggtaaatatgaacgggctttggctcaaagaaaggaagctatcgaccgtttgcgaaaaatctgaaatccttttcaaaaaattgcactttcctcttgattttttttgaaaaagtggtatcatataaatatagaaacgctgtggtgtacgacttcacacttaagtgttgaccgactattttttgtattattagggaaacaaaagtcttctaacagcatgtaggccgtctcacacggaaacagcttcagttagagcgagttgcccacctgcttaattgcgcgggttcaatacaaaccgtgaagtttcggcaccaatacagcttttttctttgcctccttagctcagctggcagagcagcggactcttaatccgtgggtcacaggttcgatccctgtagggggcatataaatacaacaggaaaagccttataatatagggctttttttgctttccttttaaaaattgtcgtgcaatttgccgtgtttttacaacaaacttttcacagccataaactcctcactaattttttcctccaaggtatgcccataaacgtcaatcaacatggagatatctttatgtcctaaaatttggctctttgtcaactgtagtgggttgaagtcagctaagctcgagaaaggacaaattttgtcctttcttttttgatattcagagcgataaaaatccgttttttgaagttttcaaagttccgaaaaccaaaggcattgcgcttgataagtttgatgagattattggtcgcttccaatttggcgttagaatagtgtagttgaagggcgttgacgattttctctttgtcctttagaaaggttttaaagacagtctgaaaaagaggaggaacctgctttagattgtcctcaatgagtccgaaaaatttctccggttccttattctgaaagtgaaacagcaagagttgatagagctgatagtgatgtttcaagtcttgtgaatagctcaaaagcttgtttaaaatctctttattggttaaatgcatacgaaaagtagggcgataaaaatgtttatcgctgagtttacgactatcctgttgtatgagcttccagtagcgcttgatagccttgtattcatgagactttcgatccaattgattcatgatttgaacacgcacacgactcatagcacggctaagatgttgtacaatgtgaaagcgatccaacacgattttagcacatgggaaaagttgtctagctaagtcatagtaaggactaaacatatccatagtaataattttgacgcgacatcggacggctctatcatatttaagaaagtgatttcgaatgatagcttgtgttcttccctcaagaacagtgatgatattgagattgttaaaatcttgcgcaatgaagctcatctttccctttgtaaaagcatactcatcccaagacataatctcaggaagacaagaaaaatcatgtttaaagtgaaagtcattgagcttacgaataacagttgaagttgagatggaaagctgatgggcaatatcagtcatagaaatcttttcaattaacttttgagcaattttttggttgatgatacgagggatttggtgattcttcttgacgatagaagtttcagcgaccatcatttttgaacagtgatagcacttgaatcgacgctttctaaggagaattctagtaggcataccagtcgtttcaagataaggaattttagaaggtttttgaaagtcatatttcttcaattggtttccgcactcagggcaagatggggcgtcgtagtccagtttggcgatgatttccttgtgtgtatccttattgatgatgtctaaaatctggatattagggtctttaatgtctagtaattttgtgataaaatgtaattgttccatatgattctttctaatgagttgttttgtcgcttttcattataggtcatatgggactttttttctacaataaaataggctccataatatctatagtggatttacccactacaaatattatagaacctaaaattttcgctataactcccaaatcaatattattatgccataaataactaccataagagtaatactcaatgaaaatcaaaaagcaaactaagaagctagccacagacagcacttgagtacagcaaggcgaagctgacttggtttgaatttgattttcgaagagtataaatttaaataattcaatttcgatatggcttatattttctagcaagcgctcctgcaagaaccttgactaaaaatgcataatgcatggtactaaacgataatcccagaacttctctaatataaaaatataaatctgaatcttttggcatttcagtttgtacaacataaatgtattcaggtgtcgcttctcgagttaaaaccatataattattataattatcgtaaacatcttttatcacatcactagttatggtattagaggtattcttgtggtaatagtaagaatctagacaaatttttttatcactaaaaagcgcatctgctaaagaatacccatcagccttatgataacaactgcaagcaatattccagagagccaacatccgactcgcataaactacgtttagatttttacccccatacgcttctttaatcaagttcgcaaatgaagacgcacagctagcagtaaaaccataccttccaaccaaatcgggcgacaacttagccaatctttctaacttttggtcttgaataagctcttcaaatgtatgttgtttcgttctagaaacaatcggttgtttttgtttcatgatttgtttctccttttctataattcaagttaaaatatttttattatacgttttatactattataactggtggtgctctcaattccatttatctacctctctaacaaatacatcattgattaacactttttagagtaaaaaaatatgtttttgtattcgtctttgattaacacataaggacgaaaaaaatttagaaagattcctttctaagcatattataccgaaatccagataaagtgtcaatacttgattaacacttttcttgaaatttttctagtaaatcttttttctttaaaatagaagcaaacaaaactaacttcactacaaatgaaaagaatactctcccctttgtaagctctctcaactttaactgtatatctctcataccttcatatactaatgtgtctaaagtcaaagttgttctcaagctagtggcatctatatccacgctttcactaatttcacttatcttaatttttgacttgttcaactctacccaatcaataatatcaatctcatgtgatatctggttataagcaacttcaatcacatagccatcagaaactgggatatctgaactgcctaaataaagccttctaacttccctcaatcctaaaacgctatctctacttaatttaatacctaatctttcattgttcttcatcagttcctccaagcaagtgttaatctataattaactatactatattttaaattctttttcaagcaataagtcgggcaattgccgggcaacgccccaccaacaaactcaaaaaactcatttaaacgttacaaaacaccagaaaatcaagaacatctaagcaacatatctcctacaatccctgtagggggcatctaaatacaacaggaaaagccttggaaccaaggtttttttgcttaaataaaatttttttcaaattctttagaaaactagcttaaatcataatccaacaccaattttacaaataccataaactaagcttatatacccaaaacacaaaaagtcctctttccactattttagaaagagaactttttctttaggagaaataacttaatttttaatcaattcgtgatagctcagctggcaccgttaagtaataagttgcagtcaagcttgcttcaccttgattgacaaaaatctcgatggaatttttatctagaacaacttccaattctttagcttcaatatctacataccgtcgactagtgtcctgttcttcttcacctagaattttttgaataagatggctacgatcaatgtaaacttgctgcgcattactgtcataaccaaattcaagataatctatatcatttcctaagtggtaatgacaatctttatctatttggatttgatattggccttttttaacagggaattgtcttagtttgccatcttccaatcttagaattctaggtagagtcatggcacatgcccacttgtgttcttggtcatgggttggaagggtacgcccccatgtctgcatccaagcaatcaggatacgacgattttgatcgtccaacaatgtttgaggcgcatagaagtcttggccatgatcaatttcttgaactgattctgggataaaacgtttttctctccaatctaccttacccgtgaacaaaagcgatgagttgatgttatgatatgagtctccctcacgctgataacgcatgggtgacataataaggcaatctttcccatctaactcgaagtaatctgggcattcccacataaaaccttggtgttctcccccttttaaaaagatggattcgaactgccattctactaggttatcggaccctagtagaacgatacagcccacattatccttgtgtttggcagctactacggagtaatagcgtccatctttttcaaagagttttggatcacggaaatcagcagcaatcaactcatctggtaagtctgatccagttgcaactggattttgggaaatcttttcaaagtgaatcccgtcatctgaaaataccatattttgcacttggcggacaccggtttcttcttcgatatgtccagtgtacatgagccagaggcgatcatccttgacaatggcagagcctgagaaacaaccatttcggtcataatcttggtcaggagcaagtgccactggcaagtgctcccaagtcaccaagtccttacttttagcatgtccccagtgcataggcccccaaacactatcatatggatagaattgataaaagagatggtattctccacgaaaatagacaaatccatttggatcattgatccaaccaatctcagctgaaaaatgttcttcaggcttatattgagtattaacgagatgtttattttctgctataaaacgattggctttttctactgtgtatttcttatctcccataatcaacctctagtttttgtttgcttggtattggtcgtagtatttttgtttaatagcgaggtaatcagaaagtccgtatttttcaagttctttcttgtaatcatcccactcagtatcaatattgccatttacaatccattcagcacgtttacggtagatatagtcattcatatctgcttcgatatgggcaatcttgtccaaatcttcctgtgtcataaagactcttggatagttattgacattgctcatgtaaggaacataatattctttgataagatccaaacgccatttggcatcatcaggcatggttgttactttaccatagtatgaatctaggatagctagtggtcctcctacttcagtcttttgacgaagttctgctggtgcagttccgtttagtggtaagtgttttagactatttgacgcttgatccaattcaaagatgttttgttgtttgtcatctccgtaagttccccagttattttgcacagattggagtggagcgtattgtgcatcaatccatttagctgtcaattctaggtttttgtttacactggtaataaccatcttgtcacgtgcaaatcccataccgtttgtacgagctacgtgtttttgaccacttggtccagcaagtactggtaaaacatcataactttcgttacttccagtaacattattcttatcccatgtaaagtaaacaccaaatttctgatcatgacctttagcaatgtaactattccaatcatgttcgaaagcttctttatcaatcaggcctttttcttgcaattgacggataaatttgacaccttctttatagttatcgttatctgctgtgaagtcaactttgccatcatttcctactactaaatgatcatcgttatcccctataccaaatgcagcaaataggaatttaaaatcttcgtttccgttaccactaataaatgaaaatggaatttcatcagcctctccatttccatttggatccccgtttttgaaagcttctaggactttaatcaaatcatcagtagtttttggcatttcaagaccaagtttcttaagccaatctttgttaatccaagccatatcgttgacactgtgaatagactctttaccatctccaagctcttcaatccatggaaatgagtaaatgtgcccatcaggtgctgtcatcaaggccttgtactctggtttctcatccaaaattttcttaagatttggcatgtatttatcaatcaaatcttcaactggaataataacaccttttttagcccagttcatcaagtccacatctgaagctccgtcgttgtggatagcatctggtaaatcaccactagaaatatccaagttacgtttttctgcaaagtcggattggtagttggtccagtcaatatgaacgccagtttccttctccaaacgttgcaaaattaacttttcatttgggtctttaggagataacggtgaactggctgtcataaacttcaatgttttcttttcttgaagcgggaatgttacaccttccaacttataatctggacttgaagctgtattttttgagccacaggctgcaagtactgctaaactagctgtcaacaaaactgctgattttgagaatgttttgaatttcatgagaaaactccttttattttttctttttttatcctttaagtgaaccagccataattcctttatcaaagtatttttggaagaatggatacataacaatcaatggcaagctggaaatgacaatagttgcgtatttaatcaattcagctaaacgtttcatttcattcatagccgcttgtgctccaatcatgtcttgacctggttggctctgaatgagaattttacgaagtacaagttgcaatggttccaagtttggatccttgatataaatcattgcatcaaagtatgagttccactgtcctacaaaagcataaaggaagagaacaaacataattggttttgcaagaggaagcatgattttgaagaaaatctgtaaatcatttgcaccatcaatgacagcagcttcaactaattcttcaggcaatccttggaaataggccctagcaagaataatattccaaacgttaacagcacctggaacaatgatagcccatggagtattgagcattcccaattcttttacgagcaagtaagttgggactaaaccaccaccaaagaacatagttacaatcaagaagtagttaatccaacgacgtccaaccaagtctttcttagaaagaggataagctgtaaacacagatagcaagactgttaaagctgcaaatccaaaagagtatagtagagaattgataaaacctcttagaatagattggtcactgaatacacgctggtaaccttctacagtccaatcggctggattaaagctaatccctctactaaccagaaccttaggatccataaaggatgctacgacgatataaagtaaaggaagcaaagtcatcaaaacgataaagacaataatgattttatttaagagtaagatacgtctatcaaattttgtatccataatcgaatttttcatactttcctccttaaattccttcaccattattcatgcgtttaacgatttggttaactgcaacaagcaatactacgttaatcactgcattaaacaaaccaaccgctgttgagtaagaatagtctcctgatacaagaccaactttatagacatatgtcgagataatttcagaagttggcaaatttaacgatgtctgcatcaagaatgctttttcatatccgacattcataattccacctgcagctaaaacaaattggataaccataataggcttaagagctggaatatcaatgtgccagattcgttggaagatattggctccatccagtcgggctgcttctactaaggctggatctacatttaccaatgttgccgtgtagagcgttgaagcccagcccattccttgccagataccactaaagatgtataaaggtctaaagaagtctggatttgtcaagaagtcagccttcattccaaacatagaaagaaaattgttgattggtcctcccactgaaaagaagaggaaaatcataccgacaataacaacgactgagataaagtttggtgcgtataaaatgagctgaattcgttttttgactttttcactcaagagttgattgagcataatcgcgagaatgattggtggtaaaaagccaagcaataaaccatagatacttaattttaatgtgttggctaacaagataccaaagttgggagaggatatgaattttgtaaactcagaaaaaccaatccaatcactccctaaaattccttttaaaggattgtaatctttaaatgcgattaaaaccccatacatagggatgtatttaaagataaaggttaaaactaaaccggggacagtcatcaataacaagagtttttgtttcttgattctttcccaaagagaaacttgcttcgctttgctattcatagcaacctccttttttgaaacgtttcatttttttctagaaaagatagcgcttggcgctgtctctttatttctttttttgaaacgtttcatttttgttttaaaaataaatctttttatctgaattcattctatcattgatagcgctttctgtcaagacttattttcattttttgttgtttttccttcaacaaattttactggtaggattgtctgcaaattaacagtctttccatcaattatatcaaacaaaatacgaaccgcttcttttgccatttcttccaatggttgttcaatagttgaaagtagataatctctatctccagccattttaattccatcgtatccaataatttggacatcatgaggaatacgtttgccatttttttctagtatttcaatcacatccaaagctgtaaaatcgttgattgtaaaaattccatctatagaagaattttcttccaagaaactctctagctttccataatagtcagtaactgtctcatccaaatcaaaaatactaagaggtattttatgctcttggacatacttttcaaatgaaattctacgacgtttggtttcattaatggttgtattatgtccgcccacaaaggctaaatgctgacatcctttactaattaattgtttagctgcttctcttccacctgcatcattatctgatgaaacacaaggaatggcaatatctgagtatgtgcggtcaatactaacaaagggaattcctgacgtcaagtaatgttcaattggactataggtaatggcaaccactccatcaactttattatgacgcaacatctccagatagtcttgctctctatttgtaccattgatagaacataagagtaatttgttatttctcttatagacttcattttccacatgcatagcaaattctgaaaagaagggatgccagatacttggtacaatgattgcaatcgtttctgttcgattttttttcattcctctagcgtagtaatctggaatgtaattcaaagttttaatcgcttgttccacttttttcaaagttacttctttaatgcctttttctttattaattacacgtgaaacagttccaacactaactcctgcttctaaagcaacatctttcatggtaattgattttctttgttctaccatattatcacctcctttcaatatatagtatcatgcaaatgctttttaagcaactatttctcaatcatttttggccagatcatttatcccatcatgaataaaatcactccaattagcttttgaaaatacttcaattttcatgtgtaaacatctacataaaacaggaaaagccttggtttcatggcttttttcgtatcttctataaaaaaagcaagagttttagatggctataaatctagatgtacattttgcttaaatgattgaaggtcttttcttaacaaaaacacccccaaaattagactttttctgtctaacttttgaggtacagttcaaacgcgaaatagcgtttttttgttatttttggttactcatctaatcgaataaacatcatggcatttaacaagtatatgagtgagaccgtgtttatattatttgaatagatgagtctcttattttcaataggaggaataataaaattagaaataatgatatcataaggtgaatcttctaaagattcctttgataattctaattcagtccaaacttccagttcaaaattattgctacaataataagaaagtgtctctgcaacgaattttgcatgatactgatcaaaattactcataactaaaacctttagtttaggctgattttgtagcaaattaatcaccaaatgtttggtatgagtgatgaaggtataagatagatgatttaccatcattgaactagaacaaacctcaagagtctctaaatagtgagaaagctctttttttatatctgaaacaaattttggaaaaatattttgaaagttcctgattgtattccctttttgatcaaataaaataaactcagtaaacaactcttgacgatacagatgtgcggtattatgcagatgccaaatcagattatccttattctccatttcaatctgatacttgactgaaatctgatcaataaaatcactcaatagatggtaagatttttcaacataactatccttttttacgcatttcataaagagactttcatctatgaaaaacattttttgaaagtaagacacaaataattggcaaacaacttcttcatctaaagagatattgtattctgattcaaaactctgagcaacaccttctattccttctgcctgcattaaaaaatccaaactttggtcgttaaaagaatctttatctacttccataaaatgaccaaactttattctatataggttcgtaactaggagcaactttagcattctatgcgttgacaaattcattggaaagcttgtttccttataaaccaattctaacaattgagatagtggctctgatgaaaaattttcaaatggccattctaggaaataatatttttctgaaaaatattgtgcaaaaaagtaacgaatgtctctctcatttccaatgatttgaacaggggtcagactaacttcaaattgaaattgccttttaatcactttattgatttggctaataatacgatagagcgaagatgaactgatataaaattctttacaaatactctcagcttgacaaccttcattaaagaagatgaattctaaaatcgaaaaatgagttgaatgtttaaagaaatgatggtaaaccatttcaatatcactatcatcggtattaataatgcgtataccattagtagaagaatgaaaaatcaagtcaggaaaagcagatttaacatgggatagatcatctttgactgcacgttctgtacaatttaataactctgctagttcagaacgatgaaaccaacgtttatgttcaaataataattctaataattctaattgcctatgactttttttagataataaatctctcatgaatatctttctctctttataaattatcggattaaacctcttgcaattataccacaaagaataggtatagcatgatataacgacttttcctaaaatcttttatttcgtataataacactacggagacaatatataaacaattttcttattttaccgtctattgagggcgtgaatacagaatcaaattcaagtctaaagattatatttttaattttaaaaattatataatagcaacaattaaagaatttgattttttaaaattatataataataacaatcgaaataattgacttttctatattaaagttatataatagtaataatcaaagaaattgattttttgatattaaaataaaaaaggagggtaggcagtgttgtgatcaattattgctggaggtcttattggtctcttggcaggtaaaatcactaaaaaagtagttctatgggaatcatcgcaaatgtattcgctggtttagtcggggcatatgcaggacaatctcttttaggtagttggggtccagcaatcgctggaatggctttgctcccatctattgtaggtgcagcgattgtgattactgtagtgtcattctttacaggtagaaagtaaacttttcgccagtaaagttagcaaactatttttaaatcaatgacgggaaaaatagtttaaatgttaaatcgaaaggattgtatatgtcaaaagcaaagaaaatatgtttcattattttctgtattttaatcttgacaattttccttcctgttttgatagattatcatcaagttagtgatctaggtattcatctacttagctggagacagaactccgtagttgaattctatcttgctagatatgtcttttgggggacagtggttctatcaactttagttttattatccattttagttgtgatgttttatcctaaacgttacttggaaatccaacttgaaactaaaaacgatacattaaaattaaagaattcggcaatcgaaggttttgttagaagtttggtgagtgatcatagattgatcaagaacccaactgttcatgtaaatttacgaaaaaataaatgtttcgttcatgtagaaggtaaaattcttccttcagacaacatcgctgacagatgccaaataattcaaaatgaaataactaatggattgaagcagttttttggtattgagcgtcaagtaaaacttgaagttgcagtaaaaaattaccaaccaaaacctcaaaacaaaaagactgttagtcgtgtgaagtaaggaagtaaaaaatggaatggcttaaacaatatcgatatccaattatcgctggtctcataggcgtatttctggcttgtttgattgtctcctttggcttcttcaaaacaatatttgtattgattttaggagcactgggagttgcagctggattatatatcgaaaaaaactatatagataaataaaaaaataaaaattactaatttaattaaaggagtttcatatgtcaaacgaaaaaaacacaaacactaacgtagaaaagaaagatgctactgttgtagctcacgaaatcaaaggggaacttacttacgaagataaagttatccaaaaaatcattggtctttcactagaaaacgtttcaggtcttttgggaatcgatggtggtttcttctcaaatcttaaagaaaaaatcgttaacagcgatgacgtaacaagtggtgttaacgtagaagttggtaaaacacaagttgcagttgacttaaacgttattgttgagtaccaaaaaaatgttccagctttatattcagaaatcagagaaatcgtatcttcagaagttgctaaaatgactgacttggaaattgttgaaatcaacgtaaacgttgtcgacatcaaaactaaagaacagcatgaagcagactcagtaagccttcaagatcgcgtatctgacgttgctgaatcaacaggagaattcacttcagaacaattcgaaaaagctaaatctggtcttggatctggtttctcaactgttcaagaaaaagttagcgaaggtgtagaagctgttaaaggtgcagcaaatggtgtagtatctcacgaaaacactcgtgtaaactaagataaaataaatataacaggagaaattatcatgtcagtagaagaaaaattaaatcaagctaaaggttctattaaagaaggtgttgggaaagccatcggtgatgaaaaaatggaaaaagaaggtgcagctgaaaaagttgtttctaaagtaaaagaagttgccgaagacgctaaagacgctgtagaaggtgctgtagaaggtgttaaaaacatgttgagtggcgacgataaataaggttaaaagttactttatctttttagtaatattagtcaaaagagtctgagtcaagatgattctcagaaaacaaaaagctagagattcccaattgcggaactctagctttttaattttgcctctttctcttattatatttcagcaggttgttggccatgagtacgaatcccatgtcaattctcacttgacgcttacctctcagatgacatctcttataacccaaacaaacctttatctgcccaaagacagatttcatatcaatcttacgtttagcgaaaatttgtctacccttggaagataaaagtgcctgatattctttagtttttaaacactggtaacgttcattcatatacagtctcttttgaggggctgattcaggttcataatcgcagtcaacattgatttcaaggctgtttgctttctatctcccctttttcataatgtataataaaatgaaataataacaggacgaattgatcgggacagtcaaatcgatttctaacaatgttttagaagtagaggtgtactattctagtttcaatctactatattttcgtacaggtgcttcaaccatttgaacgatttcaaatccttctttttggtaaagattctgagctctttgatttgcctcgaagacatttagagaaatactgtctatatctctattttcaaatgctaaactaacaaatttccttaaagccttgctacctaagccttgctcctgtttctgggggttgataaaaaatctcccgatatgaagattgctgtcttctagcctgattttctggataaatcccacaaactcttgttcatcaaagattgaaaagactccttccaaggcttgaagtgtcagtagaaaaggaatccttggtcccatccattgttcttgaaaggatttgcctagggagttggaccactggcatacaaattgagcgttttctgtgctcaccttttcttcaaaacgaattgtcatcttttcctcaccaccttatctatgtttctccattatactatttctcccattttttacgaatagataagtatgattgatttttatttttttctcgtcgggagcattctagcttcctttcttggtttggtcattgaccgttttccagagcaatccattatcagttcagccagtcactgcgattcctgtcagactcccttgcgtcccttagatttgattccgattctctcacaggtcttcaatcgctttcgctgtcgctactgcaaagttcgctatcctgtctggtatgccctctttgaattaagcttaggactcctctttctgctttactcttggggatggctctccttggggcaagtcgtcctaatcaccgctggtttgaccttgggtatctacgactttcaccatcaggaatatcccttactggtctggatgactttccagctaatcctaatagcttcctctggctggaatctggtcatggtctccttcctcatacttggaattttggctcattttatcgatatccgcatgggtgcaggggatttcctctttttagcttcttgtgctctcgtctttagcgtaacggagttactgatcttgattcagttcgcttctgcgacgggtatcctggcctttctcctgcaaaagaaaaaggaaagacttcctttcgtgcctttcctcttacttgctacttgtttgattatttttggtaagctactgcttgtctgataaaatccaatttctgccatatatccttcatgaaattatttcacagttaaattataaattatttcttttgtacaaagggatgatgttatcaaatcgatctgttcttctatcttcttgatactgatcaaaaaatttcatttcgactgaaaatatttcgcttataaactgtaaacgaatactttgtttagacattatagtcgctagactgactagatgattactcaaaacgacgtccagaatactctttactttgcttggttttttaacaaaaatttgatcatccaagggttcaatcattttgtaacctttttgcgcaatttgacgataaaagtaagaatgttgctttggagtcaataatcctaacttaaaagctcgatactctaaagcctgtatcgaaacattcaaatccgacttcaataaaatataactatcaggattgctgacacgcttgccaaccctctcttcaaatttgactaaaaactcttcttttggcaataaaaaacatgatgcaaaataatttgcttcttgctccaaacgatcgccatcttcattcatatctttatatttatgtaaaagaatatgtcctagctcatgagctaagtcaaaatttcgacgtacagatgatttattcgttcctaacacaatataaggtcttcccaattttgaccatgcgctataagcatcagcttggccattaattaatcgttccacgatatagatgcctgaacgttctaatttataaagcaaatcatgattatcttttgaaatacctaatttttccctggcataaagagccaattcctcaatggattctcccttatgataagattcactcactacattacttaggtcatgaattataatattaggtataattacaaaactttcaaaataatcaatcaaactatctaccttatgtaaatacatagtttgaatatctattgttttccgtgttgctaggtctgcatttctaaaggcaattacagaagaatcaaatcgaatgctctcttcttcctgttcaaaataagttaaatcaacatgaaattggttggccaaatgcattttggttgataatttaggtttcgtttcgttggactcaaactgccaaatggcttgttccgttaaattaattctctgagctaattctgctctacttaaaccatttaacagccgtaattctttcaatacccgaccattaaacatttacatactccttactacttttgaccttcttgtttttctattcttggaataatttcaaaatcttctgtttccgataattctgaaaaattaggaatatcttgatatttagcttcttcgaaatggtacgaacttgattgaatatactcagacaaatcttgaatcaagtgtaactgaccagttcgtgcatcaggcataacaacatctacagatataatattgttttctgagtccgcctcataagttaaaatcataaatttttcgatattcgaatttttagtagcttgttcaatttcttgaatcatttcatcagaaactaactccatctgaattggaaaggaatgactattttcatcatttttgtaggaagaatgttgattaagataaagtgtattcatctgagcatattcaaataagtagccactcttatttttttgtaccaaaggaaattggtttgtaagtcgcttcttaccctttataattaacaatactttcccatatttttctgtatttgtttcaaattctaaatatccccaagtctgtcctgctaattgtaatttatactcaaacaaatctgctgatgcaaatgcagtatcaatatgattaggtcgcgtccatgcataaccattcgacactatcattgtctctcttttttctagacgttcatctacataatctttttgccctttcatcaaagtatctacaattttttgtgcctcaagcgaatcaaagagatcctgattcaacataattcttcctcctccaaatactttttaatgaattataccattttcttaaagaaattactacaataattatctttttcttaaagttctgtgtcagagtaatttagaaaattatatcttctatagtaaaatcaattaaaaactgaacaaatttattgggaaattcaaatcgctttctgaaaatattttaggaaccgtagtgtaatattccagattcaattcactataaaactgacctttctcctgcaaaagaaaaaggaaagacttcctttcgtgcctttcctcttacttgctacttgtttgattatttttggtaagctactgcttgtctgataaaatcctgaatcggctctccttggtggagagcttttactattttcgaaccgacgataacaccatctgacaccgcattgaagcgttccagatcggcttgactagatacaccaaaacctgtcaagactgggatgtcggccacttgatgaagttgcgccaagtgcttgtccaaatctgcacggtaattgcctgatttccctgtcactccattgatggcaacggcatagatgaatccctccgccccttcaatcaactctttctggcgctcaattcctgtggtcaagcttactaaaggaatcaaggcgatatctgtatttgccaaaaatggttctacaaagttggcatgttcatgaggcaggtctgggataatcaagcccttcacagctgtatcagccagatctttgacaaagttctccacaccgtactgaaagagggggttgaagtaggtcatgatgaccagtggaatctctgtttcaatggttttcaaggtttcaactaaagcctgggtagaggtcccgtgggctaaactgcgcaagccagcttcttcgataacaggtccatctgcaacagggtctgaaaagggaatacccacttcaattgcagagacacccaaatcttctaaaaagtgaattgtttcagcaagaccgtccaaacctttctcgtggtcaccagccatgatatagggaacaaaaattccttttccagctgctttaatagcatttaatttttctgttagtgtcttaggcatgagcttctcccttctttgctgcatctgcttccaagcggtccttgacttgaaccacatccttgtccccacgacctgataggcagacaatcatagacttttctggtccaagttctttggccaatttcaccgcaaaggcgatagcatggctagattccaaggctgggataatcccttccacacgagacaagagttggaatccttccaaggcttcttcgtctgtcacagggacatagctggcacgtttaatatcgtggtagtgagaatgctctggaccgataccaggatagtccaaacctgctgagatagagaaggcttcaagaatttgaccatgggcatcttggagcacatccatgagggaaccgtgaaggacacctggacgacccttggtcaaggtagctgcgtggtgctctgtatccacaccaagccctgctgcttcagttccatacatagctactgactcatcttctacaaagggatggaagagcccgatagcattcgacccaccaccaacacaggctactagggcatctggcagatctcgacctgtcaagtcacggtactgttgtttagcctctcgaccgatgacactttggaagtcacgaacgatttctggaaatggatgaggccccaaggcagaaccaaggatatagtgggtatcgtcgatattagccacccatgaacgaagggctgcattgaccgcatccttgagcacgcgcgaaccatctgttacagcctcgaccttggctcccaaaagctccatgcggaagacattgagggcttggcgtttgacatcttcctcacccatgtagatggtacattccatgttaaagagggctgcagcagttgcagttgccacaccgtgctgaccagcacccgtttctgcgataattttctttttacccatgcgtttggcaagccaaacttgtcctaaggcattgttaatcttgtgggctcctgtatggttaaggtcttcccgtttgagataaatcttggctccgccaatatgctgggtcaagttttttgcgtaataaagaggagtttcacgtcctacgtactggcgcaaaagctggtttaattcctcttggaaacttgggtctgcctgactttcacggtaggccttctccaactccaaaactgctgtcatcaatgtttctgggacaaaacgtccgccgaattttccgtaaaatccatctttatttggttcctgatatgccatgctttaccctctctataaatcttctaatcttttcatgatctttttgtccatctgtctccactccgctcgatacatctactgcatagggagtaaagtgttgaattgcttttactacattatcttcattaaggccacctgcgataaagaagggctgtgctagtccagtcgtatccagttgaccccaatcaaagggctggccacttcctgccacaggggcatcaaagagtagataatctgcctgagaattggggacatgcccatttccatctacctgcacagcctgaatactggcacaaggcaaattctcaaataaatcatctgccacctgaccgtgaacttgaaccaagtccaagccaactttgtcaatcgcttccagcagttctacccgacttggtgaaacaaatactccaacctttttcacatctgcaggaataagctttgccaactcagctgcctcttctaaagtcacctgtcttttactaggtgcaaagacaaaaccgatatagtcggctcctgctgaaacggctgtttccaccgcttctttggtcgatagtccacaaattttaacctttgtcaatctgcaactccttgattctctgggccacattttctgcctgcataagagctgtccctaccaaaattccgttaaagtatggggctagtcgttccgcatcctgccctgtgaaaatggcagattcagaaatgtaatagcgaccttcctcaaagtaaggggctaaatctacactggtctgcaagtcgacctcaaaggtagtcaagttgcggttgttgaccccgataatctcagcaccaagtctgtgggctacctctagttcagctagattgtgagtctccactaagacttccagaccaagctctgtcgcgtagtcatacagttccttgaggcgttcttcggacaaggctgccacaatgagcaagataactgtcgcacctgcattgcgagcgcggatgatttgcttttcatcgatgataaagtctttgttgagcgtcggaatctctacctgactggaaatttcccgtagataatccaaatgccctttaaagaaaacctcatctgtcaacaccgaaatcatcactgctccgttttcttcataagtctgggcctgttgcacaatatccacatcgagattgatatctcccaaactagggctagctttcttgacctcagcgattacctgcaagcggtcctgatgattcttcaaaaattctgccaagcgataggtctggcgcagaggctggatttgctccagcttcatctgctccacctcacgcgccttctgctctaagattcgtgctaaaaattcctgactcatttttggtactcctgtaacagtctgagtttttcaagggccttgcctctagcaatcacttgacgggccaaggcaaccccttccttgatgctatcaatcttaccattagcatagaaaccaagaccagcattcaagactgtcgtttccaagaatggacttgcttcgtttttcagaacgctaagcaaaatttctgcattttcctgagcattcccaccacgaatatcttccatagcatagccttccattcccaaatcctctggagtaaagcttgacaagctgatttcgccattttcaagaagtgcaatcttggttgttccgttcaagccagcttcatccaacccttctggtccagcaaccacgatggcacgtttgcgacccatatttttcaaaacctgagctgtactttctaggagttctggacgactaattccaagaagctgtgtttctaaagccattggatgaatcagtggaccagtcaagttcataatcgttggaattcccaattccaaacgagctggcatgatgtatttcatagctgggtgcatatttttagcgaagagaaagacgattccagttttatcaaagaccttacctagttcagctggtttgaggtcaagattgattcccaaggcttcgaggacatctgcggaaccagatttagaagatatcgagcggttaccgtgtttggccatgtgaataccgccaccagccaagacaaaggctgcagttgtggaaatattaaaactgaaagacttgtccccacctgtaccacagttgtccatggcatcatgaatctcagttggaatatgctgggcatgtcctctcatgacttgggcaatggctgtgcgttcttcaggtgtttcccccttcatcttaagagctaagaggagagaagcaatctgcgcttcagttacacgcccagttacgatacgctcaatgacatccgtcatttccacacctgataaattttcaaattttgctagtttttcaataatctctttcatcctagtttcctcactttacaacctcctcgataaaattccgaatagaagacaagccgtctggcgttccaatgctctctggatggtactggaagccataaatcggtaggtttttatgttgaatccccatgatggcttggtcatcagtcgaacgagctgtcacttcaaagtcttctggcatttcctcaatcaaaatactgtgataacgcatgaccgcacggccatcctcaataccttgatacaaaacagatggcgcttcaaagttgatattgctctgtttcccatgcatgacttttggagccaaacctagcttaccaccaaagacttctgcaatggcttggtggcccaaacaaatcccaagaatcggcttcttgcctgcaaaatcacgaatcatgtcttccatctttccagcatcaactggccaaccaggaccaggagaaaagaccagaccatctgctttttcagcttcttcatacagcttggaatcatcatttctcagaacctgaacttctgcaaaattcccaatgtattgggccaagttataggtaaaagaatcatagttgtcaatcaataaaatcatggtcttagttctccaattctagtcatagattttgctttgttaatggtttcttggtattcgttttgggcgatagagtcgtagacaatccctgccccagcctgcacataggctctttgatttttgagaatcatggttcggatggcgatggccaaatccatatcacccgtcgcagacaagtagccgattgccccagcgtatactccccgtttttccgtttccagttcatagatacgtctcatcgctcgaatctttggtgctccagaaacggttccagcaggaagcgttgctttcaaggcatccatggcagtgagttctggaagcaaacgccccttgactacgctggtcaaatgcatgacgtagcggaagagctccacttccatatacttagtgacttggacactggtcgtttcagagatgcggccaatatcgttacgccccaagtctaccaacattcgatgttctgctgtttccttctcatcagagaggaggtcagtcgccaaggccttgtcttcttcatccgtagcccctcttggtcgcgtccctgcaatcggattggttgtcacgatgccatttttgacagaaaccaaactttctggactagctccgatgatttgataatccccaaaatcatagaaataaaggtaattagaaggattagtcacgcggagatttctgtagaagtcaaatggatttccagtaacttctgctgaaaaacgctggctgagtacacattggaacatatctccgttacgaatcaagtcacgagctgtttctaccattccctcaaacttatgtggagcgatatgcggtttgaagtctaacggagatagatccaaatcttcaaattcatttggagcaggaatgcgtaattcctcaagcacttggttcaaggatttttccaaggcctcttgactgcgctcactataaagtgcatcctctatgacatgtatcttctccttcttgtggtcaaagaccatatagctctcatagacaaagaaatgcatgtctggcgtcccaattgtatcctcagggatttgaccaatttcttcataaagcgaaatcatatcgtaacccacaaaaccaatggctccaccaccaaaaggtagctctgagtggtgctgactcttatgaatcacttcataaaggaaatccaagggatcccgatcaatcacttgaccattttgatagagaaccccattttcaaacttaatctcaaaaactggattataggctaggatagaaaaacgagctgtttccttgtctctcggaatactctctaaaataaccttatgttgcccctttaagcgcatataagccaagattggtgataagacatctccatgaatgattcgttccattgtaatttccctttcagttctacttctagtccgtggtgactgtatgaaaaatccccacgcaaaataacttgcgtgaggacgaaattcgcggtgccacctcaattataggatttctcctatctctcattcctgtctcagatatctcctgtaacaggctgtgcgataaagggcactcccttgagaatgatgttttcttctctcgtttcagatgaacccaactttacagctttctctgcttgttttcagcaaccacaagctctctgtgagagaaagaactgtaatttttccatctattattttttagcttctagtagtctgcaatcgcagctaggtccttgcctccacgaccagagacattgatgaagagatgttcatctcggtacacctttatactcttcgaaaatctcttcaaaccgcgtcaacgtcgccttgccgtaggtatggttactgacttcgtcagttctatctgcaacctcaaaacagtgttttgagctgacttcgtcagttctatccacaacctcaaaacagtgttttgagctgacttcgtcagttctatccacaacctcaaaacagtgttttgagctgacttcgtcagttctatccacaacctcaaaacagtgttttgagcagcctgcggctagtttcctagtttgctctttgattttcattgagtattactagcttttttcgtattagtccagcctttttgtttgcttttagtagtaggcatggagctgtagatagaactcaagttcatcaaagcgacttaaggccctaataaaagataaaccaaacgacggatagaaaaaagcccacacacagaatatacttccgtgtgagggcgttggtaacgcggtgccacctcaattataaagggactatccctttacatctctgccttgtttaacaacaagctgcactgtaaggtgtgcgcaccgaattttcattgtttcaaattcattttcaaaatcagcccactttcactacttccaaccacctattcacaatcaccacaggctccctgaagatcaaaaatagttacttttctgatttgttgaacttattttaatactttgttttttctttgtcaagacttttttacgatttttttgaaaatatcattcgaatatgaccatgtcttccttagatcgaacatgaacatgtcccacttcttagaaattggatccaactcaatagaaactgaatggaggctaaacagaacttattttagaacactccatcttttccactaggattttcaagaattaaacaatactagaaactctgtctcctaacaaatttaggagaaacttcaacagatgtgacactttcccctttaataattgctaaaacaccttctatcatttctttagccaatttaacataattgggagcaattgtagacaaagctggagtataatactgagaaataggaatattatcaaatccaatgatagaaatatcatctggaataagaattcctttctcatagcacgcacgaatcaagccctgaaccttttcatctcctgaaacaaaaataatgtccggataattttgggtagtcaagtgctgcattgcataagaataaactgaatcaattgtagataagccataaatgacttttaaatccataaagtaatttttatcattcagaaaagaacgcacacctctttcacgatccttattaacatgggattctcctcccataagcaaccacatatttttaaatttttcttcagttacagctttcatcatatcataagtagcttgaaaattattattagatacatagactactccagacgtttgagattcaccgaaaacaagaaaaggcatatggttcttctttaaatactgaattctgatatcatctacactttcataaaaaacaataacaccatctactaggctacctgtgcttgatataattgaattactaattgtatcctcctctccaaagtactcaactatagcattaacaccaaattctttacacgtccgtaacactttatctaacagcgtatgaaaccaaattaaaggaaaagagtcgattttttttacagaaatcaatatatttatagcttcttttttagttaaattttttgcatacgcatttggaatatacgacaattcctctataactttttgaatcgcttgataagtttcttctttaacatttactccaccattaataactcgtgaaactgtttttggagaaaaacctgataaacgtgcaatatcataaatagttacctttttcccatttatatttttcatttcagtcctccattacgaacattctaatattactatacaatatttaattttttttaacaagagaatttagtaaattatttaagatccacaaattcacaaaattaattttacaaatattcttccccttcaaaaaagtttaaattgcatttcacacctttatttttaagaatgtttccaacttcacgacaaataaattcatatgagaaaaaactgccataaaattgtagattaactttttcagtaaaatgtgtaggatttataaaaacatataatagcctgtcaatgtaacattttaacatagagttaattttttctttaaagataacatttgttatcaactcatcaggaggtaaatgaaaggcaaacaccatttcacaaatatcataaaaagaaataaatttgtatacttgtatcaaacaattattatcaaaatattctattttacctaaatcaaaattgattttataatctttcataaaaacctctgagcaaaaatctactcaaaaattagatgattaaaacatctaaaaagcaaaaggacaaaaacatctgtccctttgtttactaaatttcagctaatttcttcgacataaataacacctacaatattagcaatttcttccatcagtcgaagatgttcaaatctacctgataattccagagtaataaatgacgctatttttttgtccggaacatcaaagtattcaattctgtcagaattaacatctccaaacgctgttcttgaatcggtcattctgataccattttctgcacaataaaccaatacacgattataggcttctgtagatttaaccactatatacaattcaatcattttagaacgattttgcagatatttttttagtggttggaacatggatatcacaccccaaacagaaatggctactaaaagagctccctcataaaaacctactccaatagctaatccaattcctgccgaagcccaaatgcctgctgcagttgtcagacctgtaattttctttttatctgtaataagaatcgttccagcgcctagaaaacccacacctgatataacttgagctcctaatcgtgtaggatctcctgtcccaaatttataagatacgtattcattcgtcatcataatcaaacatgcagctagacaaacaatactataagttcggatgcctgcaggctgggatttgctccctctctctaaaccaattatactaccaatgactactgataaaacaatcctgacaactatttcaatatttgataacccaagactagtggctgtcatgattatttccttactttacgccccggtctttgtgtgaagtataataccgttccagaaataatcatcagaacaattgtataaacaaataccagagcttgtgcattagatgttgctgtttcatcacctgcagatcgaatcgtaatacctaatggttgagctaggggatggtaaaggaatacagataagtcgaagtcagttaataaagagttaaagtttaaagcaataacagagagaacaaccggtaaaataaatggaatgataaccttcatcatagtataaaaaggtgaagcacccatacttcttgctgcatcttccatctcatcatcaacactaaataaaatagcacgtaccattctataagaaaatgggatttttacaactatatatgcaataagtagaattaccaaactacctaccaaaatctgattcaagacaagaaattgtggctgattaaaagtaaataataaacttactgctaaaagtgtacttggtagtaaccaaggaagtagagcaccatattcaaataagaaatcaaaacgagatttatgttttctgacaacacgagcaaatacaactgcgagaattgttgctgttgtcgcagcaataatagaataaataaagctgaccaagaatggagagaatgccgcactattactaaagaataagcgataattttctaaagtaaagtttgataatgttaagttacctgtttgaattgcaactggatctgtaaatgagtataatactataaaaattagtggaagcatgaaaactgtgaacaatccatatgctacaatgtgagcaatgatattccaaggcttagacgcaattttttgttttttaagaggcgctttagtcttagagatagaaatataatttccacctttttctatcttattcatgatagtaagcaaaattgtagttgcaatacctaaaataattgcaagtagggcagctaaatcacgagaattccccatccctgcaaatgtaataatcattggatttatagtttgaaattctttaccaccaacaatcatgggtgctgctactgcagataaaccactaagaaaaaccataatagtaagtgcaaatagagttggaattaaggttggtaacactacttttcggaaaacagtaaatggttttgctcccatatttcgagcagcctcaatagtgtgatagtcaacgcttcgaattgtatttgttaaaaacaatgtatgattagcagttcctgaaaatgtcataatgaataagactgcaccatacccaataaaccagttagggtctaaagaagggataacattttgtaaaaattttgtaatcaatccataaggaccatagacaaatttatatccagtcgctaaaaccactcctccataaattaaagaggtcatataacctaattttaaaattttagcacctttaatatcaaagtactctgtaaatagaacacaaagaatacctacgacattaactgtaataatgagtgaaaatgctaacttaaaactgttcataatactctgaagtgccctctgagattttagaacacgatgtacagcatcaagggaaaattctcctccttttacaaatacattcactactagatcaaagtttggataaataataaatgttactaagaaccagattaaccctaaacgaataagccaatcttttaaatttaatttatgacgcatactgcacctccttaaaattgcagaacgtctgatggtgtgataaataattccacactttctccgacagatctaatagcagcctgactatcaatacttgttacattaagaatctgactttcagaaacttttattgtatagtgaattgtaactccagaaaactcaacatcaataattgtcccttttagaataaaatcttgttcagtttcacgattgaatcgaactttctctaatcgaatgtatccttttttatcctctaagaaaacgcttgtatttttcaataatacttcgtggactgtttcatcggtcaaaacattaatatctccaataaaatcacatacaaattcagtttgagaattatgataaatctctactggtgtaccgacctgttcgatgtatccattgttaaagactgcaattctatcagataaagtcaaggcttcctcttgatcatgagtaacatataaagtagtaatacctaactctttttgaagtcttttcaactcttttctcaaatctacacgtaattttgcgtcaaggtttgacaatggttcatctagacaaagaattttaggttcaagaaccagagcacgagccaatgctaccctttgttgttgacccccagataattctgatacattacgctgtaactgttgatcagagatcttaatttttgctgccactgctgatactttagctttaataacatctggagctaccttcttaacttttaaaccaaatgcaatattatcaaaaacagtcatagttggaaatagcgcataagattgaaatacaataccaattccacgcttttcaggttccaaatgagtgacatctgttccattaacttcaatacttcctgatgatggatctagaaaacctaccaatgctctcaaagtagttgatttaccacatcctgaaggcccaagaaatgtaaaaaattccccttcatgtatatctaaattcagattatcaattgcaacaaaatcaccatatttaatttgaatattatcaaatttaatcatctcactaactccctctattactaaaccaaaagcctctctttatttcttccataaatttagaaataatagagagacttggacataaaaattaactcttatttcttattgtacgtattctaattcagctttttctacccattcatccaaatgctttccaacagcttcccagtcaatattttgtggtttcacttgatcaacaaatttcttcgtatcttcaggtagatctttgagggcatctttatttgcaggaatagatccaaagttcttactatattctacttgaatttctgattgaccaaaccaatcaataaattctttagctaacgcttgttttttactagtgcttaaaaccatagtttgttcagttacaaatggtacaccaatctcaggagtcataactttgaaaacaacattttgttctttttgtccaactaatgcaccagaaccccacatcattccatattgtattggatcttctttgtctaacatcttaacaattgaactttctcccttttgaagagtgtatgcatttttcaaatattcttttgctacttcccaacctttttcggaaacacctaattcacctttatcatcaaggtatcgaactaagatacttgctagaattgcccgtcctgtacctccttgaagaccagaaattgaatatttacctttatacttactacctaattcagtccaatctttaggcatttcttttacatcaggcgccccaattaaaactaatggttgaacaatcacaggattataataattatctttatctgataaagattgatcaattttatctaaccatttaggcttgtactgtactagtaatttttgatctctaattttatttgaatcaacagcaccaattccaaataccatatctgcaactgcattattcttctcagcaataacacggtctgctaattgagcgccagcgatatcaaccatttttatattaaaaccagcttcttttgctttagcagttaaccaatcaccacgaccatttgagactgagttcgaatagataactaattcttgacttttatcagctttttcttcagatgaagaagcagtcgtagaatttgaacctccagagcaagcagcaagtgtagtaagagcaactcccgttgcaagtacagtagaccaaactttcatttttttcatgataagttctccttttttattattttatttaaatttttcgtgatatggaacaaattgtctcatatcttcaaatacagtatagtcaatacggtttacagtaatagttggaatcttctctaataaaatttcagttaattctgctctgactttagtaaactcttcttcctcctcttcggttagaggaatccgaagatacccaattgaaatatggaattgatatctatcatgattagggaaacaaacacctgctttttctgagacataagtacgaatttcttctaatctctttgcagaagcttcatctgcaggttcaactagtatgttttgttttcccatttcagttatacgcatatgaatttcttcatccaacaatggaaaaatttcaagttgtttagcaaagtaatcatgtatttcctgtaaaggtgtatctagaggaagattactgctccaaaactccgtttcacgattttcatggcacaacaattcaattacagtcatgtgaatagaattccttggagttaaagtaaacttatcgataaatggtaattctctataacgtgattgaataatatcaacaacttccatcaaatcttgtttagtataaagatttgctacaactgtattcccagggaaatgattaaattccccattctctttgaacttaatttttgttaagtttttcatataaagaccttcttttttatatttgacatcggtgtcatcatgtttacattatacaatgaaaccgtttcctttgtcaagcacttgcaaacatttttttaaatttatctttcattaaatatgcatttcattaaaaggttaagtaattttttcaaaatacagcactcatatagacagtatcatcaattatagccattgggattttttgattgccaattccatgtatctctacacatgtcttcaatcgattttgttgtcctccaatttaattccttatatgctttgtctgcatttgcataacaagttgcaacgtctcctgaacgtcttggaactattttataaggaatagggatcttattaacactttcaaatgtatttacaagttgtaatacactagtgccttctcccgagcctaggttatagatataaacatctgttttttcagatactttttctaaagcttttatatgtcctattgctaaatctactacatggatataatcacgcacaccagtaccatcaagcgtatcataatcatttccgaacacacttagctctgatagcttacctaccgctacttgtgcaatataaggcatcaagttgttaggaattcctgagggatcttccccaatcaaaccagactcatgagcaccaattggattgaaataacgaagcaacgcaatactccattctgaatctgccacatgaacatcttttaaaatttgctcaagcatcactttcgtatacccataaggatttgtcgcacttgtttgcatcgtctcaattagaggtgactgattgttaattccatatacagtcgcacttgaagaaaagacaatctttttaacattaaattctgacatcacttcaacaagtgccaatgtactcataatattatttttgtagtacatcacaggcttttgcacggattctccgacagctttataacctgcaaaatgaattgcagcatcaatcgattcttgttcaaatacctttctcaatgcttgtttatcacaaacatctaattcgtaaaacacgggacgtattcctgtaattgcttcaatacggtctagcaccaagatgctagagttcgaaaggttgtcgacaatgataacttcctttcctaaatttagtaattctactacggtatggctaccaatataaccagctccgcctgttaccaatattgccatctgggtttcctcctaattaattccaaccgacttaacaaatctcataaacgcttcatgcccagacggtgtattcttataaactcctgcatcttccagaactctcgcaaacacttgtcctgcttcgtgttgaactacgctattaacctcttctttattaatgcgaggatatttttctttcaattggtcggcccattctaaatgataatccgcaattgcattatcctctcctaaaagatattttccaacttcttctaactctggtttcaaacgaggtggtaatatcgcaagtcccatcacttcgattaacccgatattttcctttttaatatgttgtacatcttgatgaggatggaaaacaccatctgggtattgttcagtagtatgattatctcttagaacaatatctaattcgtatctcccgtccactttacgagcaataggagtcaccgtatggtgtgggacatcttcagtcatagcaatgatgtctacttctaaatctgaatattctctccacttatttagaattttagtagctaaatctaacaagcgatttttattttcactttgtaacctaattactgacattggccattttacaataccagcattaacatcctcaaagtctttaaaacaaaattcactctcaaattttgctttttccattgggaaaatatgtttccctccctggtagtggttatgactaagaatggagcctcctgagataggaagatcagaatttgaaccagcaaaatatcctggcaaaatatcaacaatctccaataattgttcaaatgttttagaggtaatagccattggtacatgttgactattcaaaaatatcgcatgctcattaaagtatgagtagggagaatactggaatccccatacttcgtcaccaagtttcaaccgaataattctatgattcgaacgtgctggataatttattcgcccctgatatccttcattttccatacatagtaaacatttgggataattagttgcttttactaatttttcagcagcaattgtttttggatctttttcgggttttgacaaatttatcgtaatctctagctctccgtatttagttgatgctcgaaactcaatattcttagcaatagcagaagttttaatataatcactatctttacttaacttataaaactcttcaactgcttcttgaggtgatatatcatatgaactccaaaaaatatcatttaatcgactaggtaaaggaactatgaaattcattaactctgctcctaaacattccttttcctcgattaaatctttaattttaccgttttttaaggcgatttccactaagtaatcttttatttgtttcaggtcattttcatcggaaatgcgatcaattccctcctcacctattaacgctagtactctatttttcacatatattttgtcaatttcattatacattccgtattcaattactctatcaacaaaattatcaataattgttttcatatatttttctttctaatttatgttcccatattttctatacattatccatttataaattgcttgcgtagtatgagcaattttatcaaggtgatgaataatatctaaagcactaattacttcagaaacgttcccatcatcttcaaatatgtaattcattattttcttttccatatttatactaagctcttctatctcattctgtttttgtataacaaccatatctaaacatccagattgttcctctctataacaagatatagccctattcatatgcagtccgataacttcatgaagtatttttatttttgaaataattttcttcaaaatttcattattttgaagaatctgtagattttttaaaatttcaacaattctatccccaatacgttcaatgtcagttgatatttttattacactaataattcttcttaagtcatatgaaacaggatgttgtaaacaaattaactcatatccttttttatcaatatttagaactgactcatttatgattaaatcttctttaatcaattctactcgttcttcatttgataaatattcaaataacttctcatatttatcaagcacagatacccaaatggtctctaaattatttgataattctataatttcattttctaaatataaccttaacatttaggtacctcttcttaacaaagttcaatagtaacaattaatattttaaacaatatatcaaacatcaatgactagaatacttgcatcatccttctttccatagattggatcaatagcagaagaattaaatctcatcttaattaactcttcaaaagttttattttgattattttgatagaattcataaaagccatcgctcattaaaacaatttgttcactagtaacatctatttgattaataatagcatggtctaaaaatctctcatccaacgaacctatccagtacccactcggttgattagataattttctgattttttgtaaaataatttttttatttaaaacactatttgtaccaattgaatcttttatctcatttttccctttttcaaataagttatctactctatgatcagttatttccatttcgtttactaacatgacgcagtcacctagcatcatatactccaactttttttctgaaagtttagcaaatattggtaagcgataatatagtatattgaaactagaatagtacacctctacttctaaaacattgttagaaatcgatttgactgtcctgattgatttgtcctattattatttcattttactatactctgttaatttatatgagtttaaaccgatttcatctttaacctcgagtaaagcagtttcaaatatttgtttaagagtttttgattctttacaattaaccgacaaactttctgataaaatatgtacaacttctgagactgaataacctatctcctctttagaattatataaatctgtagctccaccaataatccaaaaatactgattttgtgaacctacaatatcctcattttctacggaacttccttgtatcgaacaaattttatttatctttaccataatacttcaacccttttagtgtcaaaagtaaaccaattcctgtcactgttaagaatagttccataatcttattcgaaccagtctttggtaatttttgttttacatctactatttctttagatttattaatatgattttcagtttctctgccatctccaactattttatagtttacttcttctgtcttattatcttgtttattgtcgatcttgtcattcatttgtctattatctttacttgagttaaactctccgttcttctggttactatcaattacattatttgaattagattgtttttcctctttgtttttttctttttcgtttttatcacttaaattatttgttacaattttgtaaagcccattctccgttacaatattgaaattaccatcgctatcacgtataacaggttctttcccatttgcattagatttgatgaatgatatatacttaccggataaattataaaattggttatttaaaacggttattttaccctttgaatcctcaataacaattccttctttacccccgaatatactattctctgagactactaaattatcactaactcgtaataattcaatatttggttgttctgtttccttagaattattattaattacattttttgttacagtaatatctgatacttttcctaaatattctgcactatcttttgcaactcgtatcgcttttgttttaggatcggcaatattaaatatattttcggcgataaccacctgtttatttaaatctaataggtctttagtgtttttatagctataagcatttactaaagctgctccgctttctcgataatgtacactctctcctttaactttcttatcaaagcgatttcctttgattaatacatcagtgaatcctgtaaaacgtacacctgcatacatcatgttatcaaaatgattattttgaattttaatattagaggggttctgtgtcgacaatgtttgatagtgtgtgccaattgctgttactaattccccagatttatcacttttgccaaaataggaattttgaatagtcacattttcagattttttcccatcatcattcaaggcataaggaaaaccttttctagttaatggttcaatctgaatgctctccttacttatgatttgcccatccttcatcgttttgggtaaggcttgcccaagaaaacgagaattatcaactaatacatttttcgaacctgcaatttgaatagcatgcccttgataactatccttgaatgttacattttttatagttacgttatttgaattcccaatagcaaatgcacctgaagaatttataagtggtagattttttgctttagttccttcttcattcaaagcaccgttcatatcaatcgtaccaccagaataactaatatcttctgttgggccccattctacttgcgcaccatcatccgtaaataaacctgtcataaaaacaatggaagggtgattcttaatatttataccatttagaattgtagctttctcattcaattctaagtgtgtatgactttttaaaaaaacaatttcttttactaaataagttccttcaggaaaatatacatttcctccacctagcccttgagctgcagcatctattgcatcttgaattgcttgtcgatcatcatgaatcccatcacctaccgcaccataatcttttacacttaaagcagtatcttcaaattcttttttgataattctgtcacttataacatcttccttataactcttattttcattagtagatgttactgtagattcaactgttctgttgtctaattgtgaattggaacgaatagtaccattagagctgatactattaacacttaacgaattatctaaaccattagtggttgaattagaggcaatcatttcagcagaacgattctgattaacagttggtgaattatctaaatcattagtaattgcattagaagactcttttgtagccatcggtgaagaactagtaacaacttcatccgataaaataccttggcttcccaaaattgaaattgccaatagtaccgagcaagtccccacctttaatttacgaatactgaatacctcattaggaacaaaatatttcatcagaacctccaatttttttactatttttaacaattgattattacttttcttaaaatagatagaatgacaccgctgtcattatctttatcatatattttccaaattgaattgtcaaggaataacacaagaaaatattaaaatttatactcttcggaaatctcttcaaactaggtcagtgccgccttgccctaagtctaggttactgacttggtcagttctatagtagactgaaactaaaatagtacacctctacttctaaaacattgttagaaatcgatttgactgtcccgatcaatttgtcctattctcatttcattttactatatctacaacctcaaagcagggttttgagctatctatggccaacttcctagtttgctctttagccttccattcaaaagtgatgctatctttcttagcttgaatataaaatatcccatttactatatttaaatttgttgatatgttgtaaattataaatgaaagaacaaataccttgtcatacaagcattcgccagggatatttacctgaatatcgctcatatggcggattgaaactaaaacactacaatatatttcttaaatagaccttctataaaagctagatttaacctcgataaaaatagatgcagtgcttctaaaatactggaatagggcatataggtaatcgtagacaagtgttttatagattgtctcgcaggagatctaataatgtatagcaagcatcactaaacatatagaatatttgtattattataatatcaacatgctataaattctatcatgcaaaagaatgactagaacatgaaagacaggcacaaaattttgaacaatattctgaaaacaaaaaaagacgcgagtttccacaatctcactcatggaaactcacgtctttcaaaaaatagggtgaattgaaaactagaacaagacactagattttctaaatgatgtctagtaaggattctaaatgctacactaaattgctcacatcttatttcaaaccacgggactcccacaagaaaggaaaatcctataaaaattctctctctgaggagaaaggggcctcaactacaggtgtaaactattatcaattgaaaacaacagtttttacactcaattagactttttaggggcaggatcactttcgcttgactgtagtttgtcatttttttgataaagttagcactttttcagaaactgttttgaaagtctcaatgatatagtctacttcttcatcgcttaatttagtatgaagagggagggtaatttcattctcaaagaaggcataggccttaggatagttcgtcatatcaaatccaagattcttataggctgtcaagagaggaagcggtttgtagtgaacattacttgcaattcctgctttagccaattcttggatgatgaggttgcgttcttctaggcttgctccttctacacgggtgatgtagaggtggcgtgaagattcgacagtttcagtcttgtgtgccaaaggatggatgcgagaacctgcaaaaccactatcatagcggtccacaatgtccttacggcgttgcaacaaacttggatagcggtccaattgtaccaaaccaagtgaagccatgatatcggtcatgttgcacttataggctggtgtaacgatatcgtattcccatgaccccagttgcatcttggcaagagcatccttagtttgcccgtgaagggaaaggatttggaattccttgtacatctcttcgtcatcaatcactggattggctttccaagtcgcacttccaccttctgccgttgtaaagttcttaactgcatggaatgagaaggaagtaaagtcagcgatagaaccagaaggttgtcctttataaatagatcccaaagcgtgggcactatcagagacaatgacaatacggttaaaggccttttgccacttgcttgaagcggtaaagaagtcacgttttttctccacgacttggaacaaacggtcataatcgcaaacaatccctgcgagctctactggaataatcaccttagttttctcagtgatagcttgctcaagcaggtcatagtccatctcaaacgtatctgcttggatatccaccatgacaggggttgctcccacgtgcgtaatgacactacatgaagccgtataggtcatggctggaacgatgacttcatcaccaggtcccacttccaaaacgcgtaaaatcaactccagagcggctgtcgcagagttgagacaaacagtcttaggtgtctgtgtgtaaagagacaagcggcgctccagttcttttgttttaggacctgttgtgatccaaccagaacgcagggtatccactacttcagtaatttctgcttctgtgatatcaggcggtgaaaatggaatattgtaatttggcattgatttgctccttttatctgtactcattttcttatgactactttattttagtacctcaaacacggtttgaaacatgattttgatgtccccaaagaaactaaactctcggagataggcgaggttatagcgcatcttttcaggaagaacatgctccacataggcctgatcaactgacagacctttctccgtcatttgactgataattgtgtcctcatccttgtagttgatgctggctggagaggtaatccctgcttgcaagagcaaggttgccatcatttcagggctatactgctctgtataacgtggcacttcaggtcgtgtaccgacaaaggacatctcacctttaaggacattgaccaactgaggcagttcgtccaaacggacacgtcggatgaaatttccaaccttggtaatgcggctatcgttagcagaagtcaccagacttccttttttatccgcatccgtcaccatggtacgaaacttccaaatcttgaaccgacggttgtactgggtcacacgctcttgcttgtaaatcactggccctttgctatccaacttgatccaaatgctcaagatgagaaagatgggagaggtcagaaccagtaagaccaaggccaaaacccagtccaagcaacgcttgaaaatcagcgaacccttccttttagagacaagctggtagtaagactcaacctcgcttgatttcatttccacaggcaagtcttcccatttcagcatgctgttctcctttgtttttattatactatttgtcaacatttttcattataccacaaaatggaaaaggcggtgaaagaaatctgtaatttgaaggatttccttctagtactcaatgaaaatcaaagtacagctttgagattgcagataaagctgacatggtttaaagagattttcaaagagtatcggccatggcccctgcctgcaaactatacatcttgtgataggttcctcccagagccaagagttcctcatgggttccactctcgataatgcgtcccttatccaagacatagatgcagttggcatcttgaatagtagaaaggcggtgagcgatagcaatagttgttcggccctgtctcatcttcgccagagaagcttgaaccaagctttctgtttcagagtcaatattggctgtcgcttcatccaaaatcaggattttaggctggctggcgactgttctagcaaaggcaagaagctggcgttgcccagtagagaagctcgaaccacgctcggaaacaggggagtcgtacccctgaggaagttcttgaataaaggaatctgcatccacaaaggctgccgcagcctgaacctgctcatcactggtttcttggtacatggcgatattggacttaatagttccatgatagaggaagggttcctgcaagaccaaaccgatgttttttctcagctcttcttgactgaaatccctgatatccacatcatccaagagaactctccctgactggaattcataaaagcgcatgaggacattgataatagacgatttccctgaacctgtatgacctacaaaggcaatggtttcacccttattaacagagaaagaaatgtcatccagaatcggatgtttaccgtcatatgagaaacacacatgttcaaaacggatattgccttcttggactttggcttgcccattttcttgaagaggttcataggtcctctcgtctatcagggcaaagacacgacctgcagaaaccatagccgtttgcagagttgaaaagttttgcgtcacctcaatcaaggggtcaaaaaggcggttgatgtactggataaaggcatacatggtcccgaccgttatcccgatagaaaaaccacggtagccaaagtaggccatcaagactgcatagcctagaagtttcagcaaactcatggcaggtctcaaaaagagggcatccaaggctacagaacggttggcgtagaccaagtgttcttggttgatttcatcaaattctgcctgcaggcgcttctcttgattaaaggcctgaataatcctgattccctcgatattctctgccagcttactattgatatctgacaagagacttctggttttctcgatgattttcactgacttttttcgatagagattgaccaaaaggaaaatcaaaggaagaaagagcaagactaaagccgtcaaacgaaaatccagcaccaacatggtataaagggttgtcagaaagataaaaactgctgagataaagctggataaaatcccagaaaacatatcactaatcgtctcggtatcgttggtcaaacgagaaacgatagaacctgctggcgtcttgtcaaagtaagacatgcccagtttctccatattggcaaaggcatcccgacgaatatccctaacaatactgtaagacacgcgcgcaaagagaagattgccgacatactgaactacagtttgtaggatgtagagaccatagtagaccagcaaaacggtaacggctagttggttaagattgctgagatactggtcgataaagtgggaagccacgaggggtatgacacttttaatgaccgtcgtcgctaggagaaaactgagtgccaaaaaggtcaggagtccataaggcttgagataagacatcaagcgcttcaatacagtccattgttcttgtttattctgcatcttcttctcctttcatttccaactgctgagactggtaggtttgggcataccagccatccaaagctagcaagtcttcgtgcgtgcctcgttcgataatttgaccattttgtagaactaaaataaaatctgcatggacaacagcactgaggcgatgggcagtgataatggttgtcttgtcctttcgcatctccttgaggttgtcgataatcgcatactctgtcttggcatctacggcggataaggaatcatccaaaatcaagatatcagggtctaaaatcatagcccgactcatagccaaccgttgcttttgaccaccagaaagactgactcctttttcaccaatcagcgtatcaaatccttgaggcatgtctacaatatcttggtaaacccgggctagcttagtagcttcctcgaccgctgaaaggggcaagttaggattgccaaagcggatattgtctaggattgaagtcgcaaaaagaaactggtcctgaggaacatagcccatgagactgcgaaggtctgtcagacgatagtcccgaatatcgtgaccgtttagataaatggcacccttatccacatcgtattcacgcaagaggagcttgattaaggacgttttcccagagcctgtctgcccaaccaagcccagtgtttgcccttttgccaaactaaagtgaatatccgtcagtgtttcctcattttcaaaagcaaagctgtcaatggcatactccaaacgcccattttcaataccatccagaggaaactcagggtcttgtacaggagattcctgagacaaaagattttcaatccgctggtaagaaaccttccctcgctgagtagtattaaagaggaaaccgatggccagaagaggccagaccagcatatccaaatagctgataaaggtgactagattcccaactgtaatctgcccttcctgaaccatcaaggagccaaccaaaagcgttaaaacataggacgaaccaacaaacaagagaaccatagggtcaaagagactatcatatttcatggtttgcaggttcttttggaaggttaattcattgactgcctgaaaagacttcaactcgtctgcctgataaccgaaagacttggtcactttgatacctgatacggactcctgtaccttgttattgagttcagaaaaagcagcttgggattcgccaaaggccttatgagtctttctccctaggcgactagtcgtataggccatgaaaggtagggggagaatggcaacaagagtcatctgccatgagatgctaaagagcatggtcaacaaagtcaccagagccgtgatagaggcatccaccgcagacatgacaccgccacctgctaaacgagtcaaggcattgatatcattggttgcgtgtgccatcagatcacccgtccgataggtttgataaaaggctgacgacatttttgtgaaatgcttaaacaagcgagaccgcatgatctgtcccaagcaataagaggtcccaaggatatacatacgccacacatagcgcaaatagtacataccaaaggctgcaagtagcaagtaaaataggctaagaaggaggtcctgctgggttaattgccccgatgtgatggcatcaatgacccgccccataaccataggaggaatgagattgaggacggaaaccaagatcagggccacaattccgactagataacggcgtttttctaacttgaaaaaccaccaaagtttttgaataatggacataaaatccctttctgattgcaaatggaaacctgaggccaatactcaatgaaaatcaaagagcaaactaggaaactagccgcaggctgctcaaagcactgctttgaggttgtagatagaactgacgaagtcagtaacctacatacggcaaggcgacgttgacgcggtttgaagagattttcgaagagtacaagaccccaggtttttcttattcataagttacgactgtaacagcacccttgtcatattcagcaataaagatattggctacattgtcatgcccttgtttactgaggttatcaagcaaccactcttcgctacgaccaatcgattccaagacatctacttgaatcacaccgtcagtcacaactggatacttaggattttcatctcccatttgcacaacgatgagttgcccattttgctcttgcacagctcgtttgacttgcttcatctggaaaatcccttggctacgaagtttgagggatacatccgatgcagacaaaccaactgaacgacaggcttctgggtcaatattcccatttttgataaggagagttggcttaccatcaatcaaacgtttcacaaagtgaacattgttgttgagctatttgagagtcaagaccagtttgattaaaatttcgatataattaagtgtcatttgttcacatccaccagttcaattgcgtctgtcttatacaattcgactttctctaacaggtacttgtctggctcacttccatttagggcacgataatagcgatctcccaccttgataagtgcgccatctgtgtttgtggaagtattaacatagacttctgacttgtctactcacaaatctttggaaacaacctcgatgaaatgaagtgaagtttgaaatttattgttagaaacttgattgttttgataagtcgtgatgctgaccaaaagcagagctaaataaggccagatctgaaatcatgaccaactcacgaaattcgcttccctttttattatggtatgccttgaaagcaaaaaaaactgtcacagctaatagaacaatcccaaagccaaccatgataccattttgctgaccgatttggctgagtacatagtcataagagtagaatttcatgtattttcactccctttcataaaatcattcttaattataaacgaaagagagtaatttttcaaaccatacgttggggaaatagatctttttttggtataataaaatctataatctgaatgaaaaaggtaactttatgaaacttatctcatggaatattgattccctaaacgctgccctaactagtgactcagctcgtgccaaattgtcccaagaagtcctacaaaccttggtcgctgaaaatgctgatatcattgctatccaagaaaccaagctttctgccaaaggacctacaaagaaacacgtggaaattttagaagaactcttcccaggctacgaaaacacgtggcgctcttcccaagagcctgcccgtaaaggctatgctggaaccatgttcctttataagaaagaacttacacctactatcagcttcccagaaatcggtgccccttctaccatggacttggaaggtcgtatcatcactctagaatttgatgcatttttcgtaacccaagtttacactccaaacgctggtgacggtctcaaacgcttggaagaacgccaagtctgggatgccaaatatgctgagtatttggctgaactagacaaagaaaaaccagtccttgcgaccggtgactacaacgtagcccacaatgaaatcgaccttgcaaatcctgctagcaaccgccgttcacctggatttactgacgaggaacgtgctggatttaccaaccttttggcaactggatttacagacaccttccgccatgttcatggcgatgttcctgaacgctacacttggtgggcacaacgcagcaaaacttctaaaatcaacaatacaggctggagaatcgactactggctcacaagtaaccgtatcgctgacaaggtcactaaatctgatatgattgactcaggtgctcgccaagaccatacaccgattgtcttggaaattgacttgtaaggattttctatatggactacaatgcggtcattcccgagttgcttgtatcgaatatcgaacagtcccggtccttctactgtggtttactgggttttaggattgaataccaacgtccagaagaaaactttctctttctcttgaagagtgtcaactaatgttagaggagggaacaaaggatcaactagctgaactgacctatccctttggtcgtggagtcaatctctcctttggcataaaggatgtttcaaaactctattaaagagtgatgaaggcaaactatcctatttatcgtcccttgaccaaaagaaagtttcgtgtcagtgatccctatatctatcctcataaatttgcagttttggatccagatggctattttttaagatttagcgagtagaataataaaaattgggaaaagtctttaaagttagaaaaaggcatattgtcaggtgtctaaaagcttgatagtatgccttttatgatggaaaaatcttctaatactcttcgaaaatctcttcaagccacgtcaacgtcgccttaccgtaggtatatgatactggctctgtcaattctatccacaacctcaaaacagtgttttgaggttgtggatagcttcctagtttgctctttgattttcatttagtataactgttagcttacaatggagtttttgttcaccctctcttctttttgttcgttttttaaaccaaaacactaacaaaatagttgatttctaaagttatttagtgtaaaataaaaacattggctcaagcctatttaaaattgaatatcgttttacttgtttatgtcgtgaattggcacgacgtttctacaaggtgccggaacacctaacaataagtaagtcagcagtgagatatggccgtttttgccatgtctatttaggggacttacttagagattaagtaggtctttttttaatatttcccttaattagtgcggacgggaggtgaaattatcctgtgaataatttcaggaatccagggaatttcatccctaatttttgagcccctagctctttcatttctaggcttaggctaaaatagttccccgaactattttactctcaaaaatcccgtcatagacaataacaagattattgtctatgataccactacaacgggaaatatttgataagactcgcttcgctcgtaatagttttatcaaatatatagtattagcaaaagggatcactatagaaatatttaaacaacaagtaaattaacttttagactttaggaggtcttatgaaattattagaagagcgcatcctcaaggatgggcatatcttgggtgataacatcctcaaggtagattcctttttaacccaccaagttgactttagcttgatgcgagagattggtaaggtttttgcggaaaaatttgctactactggcattaccaaggtcgtaaccattgaagcgtcgggtattgccccagccgtttttacagctgaagccttaaacgttcccatgattttcgccaaaaaagctaagaacatcaccatgaacgaaggcatcttaactgctcaagtctactcctttaccaagcaggtgaccagcaccgtttctatcgctgaaaaattcctctcaccagaggacaaggttttgattatcgacgatttccttgctaatggccaagctgctaaaggcttgattcaaatcatcgaacaggccggtgccacagtccaagctatcggtatcgtgattgagaaatccttccaagatggtcgtgatttgcttgaaaaagcaggctaccctgtcctatcacttgctcgtttggattgttttgaaaatggtcaagtcgtatttaaggaggcagatctctaatgcaaactcaagaaaaacactcgcaagcagccgttcttggcttgcagcacttactagccatgtactcaggatctatcctggttcccatcatgattgcgacagcccttggctattcagctgagcagttgacctacctgatttctacagatatcttcatgtgtggggtggcaaccttcctccaactccaactcaacaaatactttgggattggactcccagtcgttcttggagttgcattccagtcggtcgctcccttgattatgattgggcaaagccatggtagtggcgctatgtttggtgcccttatcgcatctgggatttacgtggttcttgtttcaggcatcttctcaaaagtagccaatctcttcccatctatcgtaacaggatctgttattaccacgattggtttaaccttgatccctgtcgctattggaaatatgggaaataacgttccagagccaactggtcaaagtctcttgcttgcagctattactgttctgattatcctcttgatcaacatctttaccaaaggatttatcaagtctatctctattttgattggtctggttgttggaactgccattgctgctactatgggcttggtggacttctctcctgttgcggtagctccacttgtccatgtcccaactccactctactttgggatgccaacctttgaaatctcatctattgtcatgatgtgtatcatcgcaacggtgtctatggttgagtcaactggtgtttatctggccttgtctgatatcacaaaggatccaatcgacagcacgcgccttcgcaacggataccgcgcagaaggtttggccgtacttctcggaggaatctttaacaccttcccttacaccggattttcacaaaacgttggtttggttaaattgtcaggcatcaaaaaacgcctgccaatctactacgcagctggtttcctggttctccttggactgcttcctaagtttggcgcccttgcccaaatcattccaagctccgtcctcggtggtgccatgctggtaatgtttggttttgtatcaattcaagggatgcaaatcctcgcccgtgttgactttgctaacaatgaacacaacttccttatcgcagctgtttcaatcgctgcaggtgtcggtctcaacaacagtaatctctttgtcagcatgccgacagccttccaaatgttcttctcaaacggaatcgtcgtagccagcctactcgctattgtcctcaatgccgtattaaatcataaaaagaaataagaaaaagaggtgcgagcctcttttttgttgacaaaataaaaacatctacctattcatatatgctagtgtcatagtcctgaaaatcatctgcatcaagaacaatttcacaactcttatacttttctcttacaagtcgttcggcttcatctggattttcagcctctatacttactaaacgtgataaagtttctgtaatttctactgtatactttttcagttttagattgctttccaataattcacctattaacaataatctatgataggagctatgtagccactctggcaatttatctcctacttcccacccatatttttccttcatcaaagctagttgtttttcgtcaccaaatttcatattttcagataaccatctcacacaatcgggatctgataaggtacagacgattaaacttaggttatcgtaacggctttcagtttcataatcaggccagatgacttttaagaaatcatacacctcttctgatgcaacaagttgtttcgttttcataatttccgatactttcctctacctttaaattctattatttctttgtctcttaatatttgaagctgttgcctaatcttttctttgatatgattgttcttaacaaagatattttttaggtcactttcaaaacgatacatatcttcaagggtaaattctgaaccctctatcttatctatacaatttagaatttctattgtccaacctcttgatgacagagagctcttccttaaaaataaaccttgcttaaattcttttgtaactttttctggatctctaacttgtccatcttgcacaagaaatatccttcctttagaaggtacttgtgataaatcaatgttacaaccaatccaacctgctcgtctagcagttggtgcaagtggttttctttgaataatcgatttcggtgtaacaaattgcttcggaaggacaagaaagttatttacctcaaaattttttgtgtaagttaaaaaaaagaaattaggattattatctgcctgcacacgcttcatcatcgttgcataagcaccatcattgattgttgatgaaaaatttccttttttgctctttagttcaaactcctcactacaatgattacagtaaaaatctgctacaggccgattattttcaaaatgatttaagggattgttcccacaattagggcaataagactgacgataaacccaatcctccgttaagatacgtgccttttggctattacttttataggtttctactaattctaaattaaaatgtaattccatttaaaaattcctcactaatatgagaactcactcgatataagcaattaaaatctactataactagtataccacatatatgtacctattacatttgtatttcatcactctcttttatatttccttctaacatatctcataaattaaaaatgagtgagataaatttatcccactcacctttctttatatccttacccgtctttcctcagacctttggcctgtgacaaacatggtaaaggttgctttgcagacatttctgccctcttgattggtgatatccacatccattacacaagttgtacgaccttgatggacacattctcctttaatggtcaatacatcgtcgagttttcctgccttaaggtagttgatagaggattggagtgtcaccccatcaagtcccagcgagataaccaccaaaccactgatttggtcacatagcgtgaatagatagccaccatgggcattgccatagtagttgagcgacgagttcactactttggtcgtcaccacaacgtgaccatctctcattttttcaatttcgtaattttcaaaggcagatatagcgtcaaaatgaaagtctttcatcgtttcctcctgatatttcaaacgacactatgatactactttttataggactgatgcaaggagaaagctcctagtctagtaaaattccgacctgttccacaaagcgcataaaggctgtctgcccttgttctgtctgcttgtagactcctgcatcctcaagtacacgcgcaaagatagcacccacagagtccttgacgattgcaagggctttttctttatccgttagtctggatgttgggatttgagttggtctgcccactcctgatgataatcggcaactgtaacagcttctcctacaagatagctagcgacttgctccacttcttctttcagacgtggtggcaagattgccaagcccatgacctcaatcaagccgatattttccttcttgatatgttggacatccttgtggggatgatagataccatcaggatactctgctgaagtctgattgtctcgcaagaccaagtccaactcaaactgtccatcgcgtttgcgggcaatgggtgtgatagtgtgatgcggtgtcctgtctgtctctgccaaaatctgcactgcaggatctgaatactggcgccattcctgcaaaatcttatcagccaaattgatcaaatcctctttggaatccgaagtcaaacgtaggacagacatgggccacttgacaattccagccttgacctgctcaaaaccagcaaatcggaaggccttttgcaagggagccaattccataggaaatacgtgacggcctccctgataatgatcatgagttagaatagagccccccacaatcggcaggtcggcattagatccagcaaaatatcctggaaactggtctacgatagccaacagacgttcaaaactctgacgactaatggccatgggacgatgctggccatctaaaaagatacaatgctcattaaagtaagcatagggcgaatactggaaaccccattcctgaccaaccatttcaaaacggataatacggtgattgctacgagctgggtggttaactcgaccatggtagccctcattctctagacaaagctgacactgaggataattactagcttgcaccaacttggctgccacaatctctttgggatctttttcaggcttagagagattgatggtaatttcaagttctccgtagtcagatggaacacgataagcgatatttctagcaatggccttgagtttgatgtagtcatttttctgactgagttggtaaaaatcctctatcgcttgttctggagagtgggcgtaggttgcccaaaaatcacgattgacctgacttggacaaggagtcaccaaatccatcagttcagcaccaaggatttcacgcgcagtctgactatcctcaatcgtctctaatcgaacggcttcttcaaccagctggtccttgaggtcaatcaatttatccagattggtctcaacttccaaaacaccttctcccactcgtgccaaaacacgattggtcagatagattcgatccatttcctcaaatgagctttcagaaatgacatgtgttacaaatttatttactaaggtcactatagagcctccttttgactagtcaaggacgcgagtgccacctgcaacttcagcgatatagaagcttggagcgtatccaactacttcctcgtagtgtttgcctacagcttccttaaaggcctcaacagtatctttttgaaccaaggcaatggcacagccaccaaaaccagcccctgtcatacgagcaccgagaactccttcttgtgcccaagctgtgtgaacaagggtatccaattccaaaccagttacttcataatcatgctccagagaaacgtgtgacgcattcatcaagcgtccaaatgtttccaaatctcctgcttggagtgctacttgagctttgagggtacgttggttttcaagcacagcatggcgagcacgtttcaaacgattttcatctttaatcagatagctatattggtcaacggcccactcgtccaattcacccagagtctgaatatccaaggaaacttgcaattcttccactgctttttcacactcagcacgacgttcattgtatttagagtccgccaattcacggcgtttgttggtgttcatgataacaacgacattgtccttcaaatcaagtggcaccaagtcgtattctaaagtattagtatctaggtaaatagcacgttggtctgcccccataccaatagcaaactggtccataatgccagagtttactccgataaagttgttttctgtttgtttgccgattttaaccaaatcgagacgctctaattttaaatcaaagagatgctcagccacgactcctgtcaagagttccaaggatgcagaagaagacaagccagcaccatttggaatatttccataaacataaaaatcaaaacctttgtcaatcacgtgcccagcttcttgcaagaaatgaaggacaccttttggataattggtccagttgtgctctttttcaaacttgaggtcagcgagaggcacttcgataatgcccttgtcctcaaagttagctgagtagaaacgcaagacttggtcgtcacgcttacgagctgcaccgtaagttcccaaggaaatagcagcaggaaaaacgtgcccaccgttgtagtctgtgtgttcaccaatcaaattaatgcggcctggtgaaaagaaggtttgatctgcttcttgaccaaaaacagcaagaaagtctttgcgaagggcttcagtagtaagatgttgtgccatatgaattctcctttgactgtccgttaagccatcttaacgtgtaatcgttttctttctattatatccaaggaattttccaaggtcaatcctttttactaaaattttagtaaaatatcagtaaaaagaagaaaaacatgatatactaacctaatcaaggaggatttatggctaccttaaaagacattgcacagctagcctctgtctctatcgcgaccgtatcccgcgtcctcaaccgcgaccagagcctatctgttacagaagaaaccagacaccgtattttaaccgttgctgaagagctgggctacaccaagcacctcaagacaggcgagtcccacaaacccaagcaaaagattgccattatccaatgggtcagcgaacaaggggagctggacgacctctactactaccagattcgcctaggaatagaaaaaagagcccaagagttggactatgatatcttgcgctattttaatgaccacccttttaccctaagcgaggaagtgattgggattctctgcatcggaaagtttagtcgagctcagatttctgcctttgaagaataccaaaagcctcttgtatttctagacagcgatacactttccctgggacatacctgtattatcacggatttttacactgctatgaaacaggttgtcgattatttcctcagtcaaggaatggaccgtatcgggattctaacaggccttgaagaaacaacagaccaagaagaaatcattcaggacaagcgtctagaaaacttcaaaaactatagtcaagcgaggggaatctatcatgatgaactggtctttcaaggaagatttactgcccagtctggctatgacttaatgaaggaggccattcagagcttgggagaccaacttccgccagcatttttcgcagccagcgatagtttagctatcggtgccctccgtgccctccaagaagctggaatcagcctgccagatcgcgtcagcctcatttcctttaacgacactagtctgaccaaacaggtctatcctcccctctctagtattacagtttatactgaagaaatgggccgagcaggtatggatattcttaacaaggaagtcctccacggtcggaaaatccctagcctgaccatgctgggaaccagactgacattaagagaaagtaccctaaatcaagaataggataacataaaaaacgaatagagttctaaaactcctattcgttttttattcgattacaatcatagacttaattgtcttacgttcatccatatctttataggcttggtcgatatcttccagtttataacttgaagtaaagacgcgacctggattgatatcaccatcaaggacggcttttagtaaaaattgcttatcgtatgttgtagcagaagctgccccacctgctacagagatattttgcataaatgtcgaaccaagagcacgattattatagtgtgggactcctacaaagcccatacgccctccattatgaagaacacctagcgcctgttctatagcagcctccgtaccaacacattcaagtgctgcatctgctcctccaccgaggatttcacgcaccttggtaattccttcttgaccacgttctgcaacaacagctgtcgcacctgactccatagccatcttttgacggtcttcatgacggctcataaggataatttgtgatgctccacgcatcttagccgcgatgacagcacattgaccaacagccccatcaccgataacaacaaccttgtcccctttttgaacatttgcaacacgcgccgcatgatagcctgtcggcatgacatctgcaagagtcaaaagggacttgagcatcccttctgtatagtcagaaggttgaccagggattttaaccagcgcccagtttgcatagtggaagcgaatatattctgcctgaaaatcaccccccaaattattgccaatatgattgtcgcaagaaccgtcaaatccagcaagacaggcatcacactcaccacatccatgtgtaaaagggacaatcacaaaatcacctggtttcaccgtcgtaatggcttccccagcttcttcaacaatcccaatcgcttcgtgtccactatttttgtgtccagctttcgtttctggattacggtacctccataaatctgaaccacaaacgcacgcacgaaccacacgaataatcacatcatccgcttctattatttgcggacgttcaatgctagcaagtccaacctgacctgcctttgtatatactgctgatttcatttaaaattttccttccttataaagtttaattttgagatttaaacgatttaaagctgtctgtagctgagacaagcgctcctctaatttttgcttttcctcttctaaaataccaagcctctcctctctcgtttcatctcccttttggtagagcgacatatagtcaactaaactatctacagagacacccgccgaacgaaaacacttaataaattccagcgcttcgatatcctgatcttgaaaatcacgaatcccagtagcagtacgagtaatcggtggcacaagaccaacccgttcataataccgaatcgtatccgctgaaattcccaacaaatcactggcagatttaatattcacacgctaacctcctctcatttcattcactgaattcacgctattctaactcacttatcttattatataactttgagttgactccaagtcaagcattttgtatctaatcgaaaaatttttatcattaacaatcatatatctggagtttatacaatgctcttctcttaccaatttttgaaatatttaaataataaagaaattactctattccaaataagatagtacccaagtatttttcacttttttctaatgttgatgctcataactccgttccaagtcacacacctttcgcttatgggtttggtgagtttctaggtcagcatcaatttcaatggtaatattttgaaaaccacaatcttttaggaaaattcgaatagactctttacaagtttccatatgttccatttcttttagacaaacatggacaatggcatttttttccaaagcatccatagtccagagattaagctgattaaggctggccacattgtccaatcgctccaggccactctttacttgcttgatatcaagaccttctggcacagcatccaagaaaatcttgagtgtagaccaaaaacgtggaagggcttttgaaagaataaagaaagaaatgacaagggacaaaagaggatctaggatataccagtccgtaaatcgaagaacaatcgccatcaggataacagctacccaccctagcgtatcttccagaaaatgcagactcagaatagactcattctttgtctttcccttaccaaccaccagactcgctaacagattgatagtaatcgcaataattcctaaccagagaatcccctcatcattgactggttgcggatgcaaaatcttcgtgacattttccaaaatgactagaacagagcccgttacgagaatcacagctgttaccaaggctcctagcaggctaaaccgcttatagcccaaggtgtactgattgtcttcttcacgattggagattgtttctagaaaagctgatattccaattgcaatcgcatctcccaagtcatgcacagagtcagcaagaacagcgctagaaccaaatactccacctgcaataaactcaacaatggcataagtcaaatttaagaaaaaagccacccaaacagcatattttgccttcatatttctcattcctttgttataatagatttatgaacaccttgttcattatcattatccactaaaactcaaagaaaggatagaagcaaaacgtcagctttattcagttctgaacaatttgccttaagtgtccatatgactaacattgaccgccgtatcagcaaaaccaaaaaagccatctatcaagcttttatacaacttttgaatgctaagggctacgaggccactactgttcaggatatcattgatctcgcagatgtgggacgatccaccttttactgtcactatgagagtaaggagcttcttctggaccagctctgccgctacctcttccatcatctttttgaaagagagcaagccatttcaaccgaggactacctcgcccacctctttctccattttcataaaaaccaagaccatatcaccagtctgctattttccaaaaatgactacttcctccgtcaactccataaagagctagaacaccatgtctattccgtgctagctgataatttaaaagaagcccaccctaatctgcctacttcttacctccaacacttggtcatgtccaactttatcgagacattgacctggtggctcaaaaaaggtcaagatttcacagaccaggaagttgtccaattttatctagaccttctcattcctaaaaattgaatatagagtaaagcttcagttgtcttatttctaggttactgagttttttatcttttcaacaacaaaagaggacccgccgatcctctttttcatactataaatccttgattatcaactatatctgttttaatcgaaatctcaaaacagcactttcaaacatcttttcctagttaagtaaatcagtattctgcttagctgccttgctccattgataccaaccaactagactgttaatgagataaattagatatttcccttgaatttgcaggctttctccccaccagagatagattgaaaagacattggtagccgcccagaatatccactgttcacggtaaacagctgtcatgaggatttgccctaccccattggttgcatctgtgattgaatcacgatagggacgattggcaccaatagactgataaatgaagccaaaggccaaccaccaaagcacactaatggaaagatactttgtccagcccttgccgtccagtttacgcgcgacaaactcctgcttttccttcttaaactgtgcctgataaatccaaactagaagtccaattggctgcatgactgtgaagtaaagtgtcgtcagcacctcaccataaaagcctttctgtagggccaaaataaggtaaataacagagttaatcaagccaaaaagataattacttgctcgaccttccgatacaaagattacacagataatccctgtcaagctacaaatcatcccaatccagtcaacaatacgatgttcgtaaaccaactccagccagagaggaaaacttcctaaaaccagcaaataaatccactgggcaaaactacgatgggcaaagaggtcatcccagatagccttcatagttcctgaaaatcctaaatcagccatagccgcaaccatacgacggtaaccacctgacatttcacctagggttgttttgatattttcaattttcttttgcaaataagtatgcatcatttctccttttgtttttaaagagccgtgtctggatagactttcggacgcaacgctctattagataatgaactgcctatacacaagatttctaaccttagtcgacatgagctgaaacctcttatttgttaagtagttcacaaaatattatacacctattttatgaatagtcaactgtctttacagtaaaattttagaaaatcatgaaaattttctctttctttccattttaagtgacattcagtcattctcacatcaaaaaagcccagacgaaattgtctgagcattcttttatctagtcgtttaaggaagttgagttcagtatgtttaaagtctctgtcccatcatttcttcaacaaaccttgttcttggagaaactccttggctacttgctttgctgacttgccttcaacaccgacttggtagttgagctggctcatctggctttctgtaatcttaccagccaatgtattaagaactctttccaactctgggtgtttcttgagaagagcttctttcatgagtggagccccttgataaggtgggaagagttgcttgtcatcttccaagacctgtaaatcataacgctccaattccgcatcagtcgaataggcatccgtgatttgaatatcccctgactgaatagcctgatagcgaagggctggctcaatggtcgctacattgagattgagaccatacattgattgcaagcccttatttccatcttcacggtcgttaaactcgagtgtaaaacctgccttcaactgcccttccacttttttcaagtctgaaatggtcttcaagccatattcttgagcaatctttttcggaacagctacagcataggtgttttgataagacatgggtttgagataggctagatgatcctgcttagcaatgccatcacgcgccacctgataaacctgttctggttcatgactcaccttgggtgatggttgaagcaaactttcagtcaccgtaccagtaaattcaggatagatgtcaatatcgccttttttcagagcttcataaaggaagcttgtcttcccaaaattcggtttaacagtcgcagtcatgctggtattttcttcaatcagcaacttatacatattggccaaaatttctggttctggacctattttcccagcaataaccaagttttccttctctttttgaaccaaaagagctggactataagacagacccagtaataaagccaccaaggcaaaacctgagaaaatcgtccgtaattttgctttttccatcacttttagtaggaagttaaaggcaatggctagcactgcagaagaaagtgccccaatcaaaatcaaactggcattattacggtcaattcccaaaagaataaaggaacctagtccccctgcaccaatcaaggccgccaaggttgccgtaccgataatcaaaacagctgccgtccgaatcccagacatgataacaggcatggcgagtggaatttcaaatttcttgagacgttcccatctggtcatcccaaaggcaatcccagcctcttgcaggttcggatcaattcccttcagcccagtgatagtattttgcaaaatagggaaaatcgcataaatcactagagctgtcaaagccggcaaggtcccaattcccatcaaagggataaagagccccaacaaggccagagacgggatggtctggaaaatacctgcaatctgcaagacccagtcggccagcttctcatgatagcgaagaaaaacagccaagggaatcgcaagcaaaatagctagtaacaaggtcaaaagcgacaactgcaaatgttgagatagagctgtcaaccaatcactaaaacgatcctgaaaagttgcaattaaattagtcatgaacactacctccaaacaagtctgctacaaagtctgttgcaggcgcttttaaaattgtctcgggattcgctacctggcgaatttctccatcctgcaagacagcaatacggtccgccaacttcaaggcttcatccgtatcatgggttacaaaaatcgttgtcatcccaaactctttatgcaattcttttgtcagaacctgcaactgttttctcgaaatagcatccaaggccgaaaagggttcatccatgaggaaaatcttgggctgaccaatcatagctcggacaataccgacccgttgctgttctccaccagataattcactaggtaagcgatgcccatactcggctactggtaaaccaaccttagccaaaagctcttctgttttcttcgtaatttcttccttgctccaccccttcatttcaggaatgagagcaatattttccgcaactgttagatttggaaaaagagcaatagcctgtaaaacataaccagtagaaagacgaagttcacgctcatcatagtctttgatgcgcttcccatccatataaatatttccatcagttggttccaaaagacggttaatcatcttgagcatggtcgtcttacctgacccagaaggccctactaaaaccataaattccccatcctcaatctgtaagttgacatctctcaagacatccttttctgtgtagcgcagtgctacatttttgtattcaatcattctttgtcctcaatttaaaacttccctcgattggtcaagtcttctaccttaggcataacttccttattatcccaatgctccacaattttcccgttctctaaacggaagatatcgtactgggcataagcaacgccatcaatctgagtctgaccatagctaaccacatagtttccttgtcctaagagttggaaaacaaagtcaaaagtgacactatattcagccacatagtttttataagcagcacttccttgtccaatatcatgattatgctgaatcaaatcgtctgccacataatcactccactgctctagctccccattttggaaaatttctgtcaagaaacggcgaaccagctttttattttctgctttcttatccaaatccttgatttcaaaatctccaaaaatttgatctagttggtcattttcaggtgttcgatagtagtcaatgacatcccaatgctcaacaatacaaccattctcatcctcacggaaagtatccgtcgtcacccattgagcttctccaccattcagatattgatgaacatgaacaaagaccagattgccatcctcaatggtgcggacaatcttaatctgacgctctggatgacgctcaaagaaatctgcaaagaaggctgcaaatccttctttcccgtcaggaacacctgtcgaatgttggatataggtatcccctacagactgggcttgagcctcagcaactcgtccgtcttgaatggcatggatgtataggttgtgagcatttttcacttgttgtgacatattctaaacctcatttcccttctctttcagattcgccaaaattctttcttgaaaaccttcaaattggtgaatttcttcctctgaaaatcctttgtaaaagatagtatccaatttctgactgacacgatgccccacttctttctgggacttgcctaactccgttaaaactaaatacttcttacgcttgtcttttccacacggactaacaattacaagcttttgttcctctagcttttttatcatagtcgtcagcgtattattcgcaagtccagtcgcaagcgcgatatctgtcgcagttgcgcagccagtttcactattccataaaaccgctaaaatcttgccctgttcacccctataaagagcctcaggatcttgactcagtaacttttgaaaaatccgcccattcaacaaacgaatatgatgggctagcaaatgaccatctttcataacacctccaatttatttcgatatcgaaatgaataaaacaattgtaacactcatcgttctaactgtcaactatttcgatttagaaataatttttgataattatccacaccaccatactccggctcaactaacttttaacgagagtttctaaactccttcgtcctccagtctacaaaagccttccattcgtactatcctatattttatgaggggacacatttttcctatcagaccatttattttaaagatagaagtaaatcataattgcttccatctgttcttttatagtatattgaagttagactagagcactgtatcttctaaaacattgatagaaagcgatttgaatttcccaatcaatttgttcgtatttatagcatttcgaaactggaataggacaccatgactgctaaaagatttctataaattcatttaatttcctcaatcaatttgttcatatcttatttcattccgctataatttcaccttaccctatctttttcgtagcacccttcaaacagcctatcccctaccgtttgacgattcctcacttcgctccacttccattacagaagtttcttcactactatgggctcggctgacttctcatgattccttgttactactatttgaacgctcacgagatagatcttacaaaaaatgctttgatccacaatggaatcaaagcattttaaagagttcctcatacataagcgcagaagtcgcagttcctctgtacttggcttcttctcttttgacaaagcgagccaagttgagcaactcaggtgctggatgtttgggatttaggagcaattcacgattgaccaggcctgagagacgaactgcctgcaattgctcatttgtagtaggcagttttttagtagtctctaggagagcagcaactaaatcttcactcaaatcatgtcgagcatgattgtaaagatcttttataaggctttctaggtttggttctaccatccctaccacctcccttatggtttaataatgtttaatcaaatcaaccgttgaacgatccaatttcttcaccaaggcttgtaagaaagcttgcgcttctaggaagtcatccattgcatagagggtttggtgagaatggatataacgagcgcagacaccgatagttgttgatgggacaccaccatttttcagatgagctgcacctgcatctgttccgcctttaccacagtagtattggtacttgataccagcttcttcagccgttgtcaaaaggaaatccttcatccctgggagaagcaagtgacctggatcatagaaacgaatcaaggttccatctccaatcttgccttgaccaccgtagacatcacctgctggtgagcaatcaactgcgaggaagacttctgggtcaaacttggttgtagaggtatgagcgccacgcagaccaacttcttcttggacgttagaacccagatagagttcattgccgagtttttgacccgataaagcttcagctagctcgcttaccatgaggacaccgtagcggttatcccaagcttttgagatgatatttttttcattggctgtcaaaattgcagaactatctggtacaatggtatcaccaggacggatgccaaaactttctgcctcagccttgtccgcaaaaccaccatcaaaaacgatatcggcaatggctggcatggttggtcccccctttccacgagtcaaatgcggaggaacagaacctgaaatcacaggaatttcatgaccatcacgagtcaagagtttgaaacgttggctgctaaccaccatggggttccagccaccgatttctacgacacggaaggtaccatctggcttgatttcgctgaccataaaaccaacttcgtccatatgagaagcgaccaagacgcgcggtgcatccacagcttctgaatgtttgataccaaaaataccacccaagccatctgtcaccacttcatccacatgcggtgtcaacttttcacgaagataagcacggacaggcgcttcatgacctgagactgcagcaagttctgttacttctttaatttttgaaaataatgttgtcatttcagttccttctttctttcatccattttaccactttttataggagaaggatagtgggaaggtggatttctaagttagtatcttagtcctgctctatcttagaaaaggatagtattctcttgcatgtagtgcaaaatctagtaaacattccaaaattaactcgaatatttatttccaaacaaaaaaacaatacaccatcaaagttgtttggatttttcatgaaatttacagaaaatagttgacttccctttcttctttctttaaatatatagttggttgagtttggaatagtacgctgtagctgctaaaacatttctagaaattaatttgactttcctaatagagttgttcatatcttatttcaatttactatagtacaaaactagaaaaggaaaaaatcatgaccaaaacaattcttgttacaggtgggactagctacattggctcccataccgttaaagctcttttaaatgctggctatcaggtgcatgtcctcgataatctctccacaggaaatcgagcggctgtggatagtcgtgctagctttaaagaactggatgtttatgatgctagcgccttaaaggcttacttagaagaaaatcagattgatgctgtcctccattgtgcaggtgaaattgttgtgagcgaaagtattgaaaatccaagtaaatacttcactgccaacgttgctggtatgaaccaagttctcaaagtcttatctgaagttggcattcaaaaaatcatgttctcttcgactgcttctctctatggaaataactgtattgacaagccggtgactgaagataccctgctcgaccctgtcaacccttatgcagagacaaaactgatgggcgaacgaatgatttactggatggccaatcgctacgactggaaatatgttattttccgttactttaatgttgctggggctgaaatggatgcttcaaacggtctgcgtgtgaaaaatccaactcacatcattccaaatatcaacaagaccgcattgggacaaaatgatagcttaaaaatatttggagatgactacgatacacgtgacggttcatgtattcgagattacatttatgtcttggaccttgcataggctcatgttaaaggaatgaactacctatttcaagaagacagttcttctcaaatctttaacttaggaactaaaaaaggctatactatcaaagaaatctttaaaactgctgaagaattactaaattaaaaaatcccacacgagattgttgctcgacgtgctagtgacccagccagtgtcctagcagatgcttcaaaagctaaacaatatcttgattggacggctagctactccctcgaagatattattttatcagattaaggtaaaaacattttagaataggataacaaaggagaaagtcttgttgctctctccttgttgtatttattaaattgtcagaaattttattgacagattagaaaaataatgttacatttatatccgcagatatctttcgataccaaatctacatgaaaggacggggtatgaaactttctcattatttaattggcttacttctactcctagtctttctctctattagcattgggaccagtgatttttcatggggaaagctatttgatttcgaccagcagacctggctcctctttcaagagtcccgtctcccaagaactatcagtattctcctgactgcctctagtatgagtatggcaggccttctcatgcagactattacccaaaatcagtttgctgcaccgagtacagttggaacgactgaagccgccaaactgggaatggtgctgagcctttttgtctttccatcggctagtctgacccacaagatgctcttcgcttttgtttcatccatcgtattcaccctcttcttcctagcctttatgaccatttttactgtaaaggaaaggtggatgttgcctctgattgggatcatctatagcgggattatcggctcagtcacagaagttatcgcctatcgtttcaatctggttcagagtatgactgcctggacccagggctccttctccatgattcagacccatcagtatgagtggctcttcttaggcctcatcatcctgataaccgtttggaaattatcccaaaccttcaccatcatgaatctagggaaagaaaccagcgagagtttggggatttcctactccctacttgaaaaactggccctctttctggtggcgctaacgacaagcgtcaccatgattaccgtgggtggcctaccatttctcggagttatcgttcccaatcttgttcgcaagcgctatggagataatctaagtcaaaccaaactcatggtcgcactggttggtgccaatctagttctggcttgcgatatcctatcccgagttctgattaggccctatgagttgtctgtcagtctcttgctaggaatcatcggtagtctcgtctttatcctacttctctggagagggggacgaaaagatgcagactaaaagcaaacataccaagctcttctggattctcattattcttgccatcggagcttgtcttctctacttttggcccatcactcacttgtcagcctttgcttggaagttgcgttcccaaaagatcatcgtttatctcttggtagccatcgcgactgggatttcgaccattagttttcaaaccctgacggaaaatcgcttcctgacgcctagtattttgggaattgaatccttctacgtcctactacaaaccctactactggtttttgaaagcaagtttcttcaacttggcaaatcccctatcttagaattcctagtcttacttcttgtccagtccctcttctttctcgccttacaaggttacttgaagacactgatgaagcaagacctggtcttcgtcctgctgatctgtctagcgctcagaagtctctttcgaaatatcagcaccttccttcaagtcctaatggatccaaacgaatacgataaactgcaaaatagtctttttgcctcctttcaacatctcaacacttccatcctagccatcggttctctgatcatcctcgctttgacaatctttttctttcgaaaagcagtcgttctagatgtcttgcacctgcaaagagaaacggctcagatattgggactcgatgttgaaaaagaacagaaagagctcctctggggaatcgtgcttttgacctcaacggccactgccttggtaggacctatggccttcttcggctttatactggccaacctcacctacctgattgtcaaagactatcagcacaagttactctttatagtggccattctggttggatttattagcttaaccttggggcaagccttgattgaacgagtctttgcactggaaattcgtatcagtatgatcattgagagtgtgggtggcttcttattctttatcttactatataggaggtctcgtcagtgaaactggaaaacattgacaaatccattcaaaaacaggatattttgcaaggcatttcgcttgaagtcagtcctcaaaaactgacagcctttattggtccaaatggtgctggaaaatcgactctcctctccatcatgagcaggctaaccaagaaagatcagggagttctcagtatcaaaggacgtgaaatcgagagctggaattcgcaagaactggcccaagaactaaccatcctaaaacagaaaatcaattaccaagccaaattgactgttgaagaactggtcagttttggacgttttccctacagccgaggtcgacttagatcagaagactgggaaaaaatccgagaaactctgaactatttagaactgaccaacttaaaagaccgctacatcaatagcctgtcaggggggcaactccagcgcgtctttatcgctatggtactggcccaggatacggactttatcttgctggacgaaccactcaacaatctcgatatcaagcaaagcgtcagcatgatgcagattcttcgacgactggtggaggaactcggcaagaccattatcatcgtcctccacgatatcaacatggccagtcagtatgcagatgaaattgtcgccttcaaggacggccaggtctttagcaagggaagaaccgatcaaatcatgcaggctgacctgctcagtcaactttatgagattcccatcacgctagctgatatcaatgacaaaaagatctgtatctatagctagtaacataaaagctcaagttagagaaccttcagtctcttagtcaataagattaagagactccctaaatcgttatcacattttaaaaaggagaaattatgaaaacatcccttaaactttatttcactgccctagtggccagcttcttgctcctacttggtgcatgtagtacaaactcaagcactagtcagacagagaccagtagctctgctccaacagaggtaaccattaaaagttcactggacgaggtcaaactttccaaagttcctgaaaagattgtgacctttgacctcggcgctgcggatactattcgcgctttaggatttgaaaaaaatatcgtcggaatgcctacaaaaactgttccgacttatctaaaagacctagtgggaactgtcaaaaatgttggttctatgaaagaacctgatttagaagctatcgccgcccttgagcctgatttgattatcgcttcgccacgtacacaaaaattcgtagacaaattcaaagaaatcgccccaaccgttctcttccaagcaagcaaggacgactactggacttctaccaaggctaatatcgaatccttagcaagtgccttcggcgaaactggtacacagaaagccaaggaagaattgaccaagctagacaagagcatccaagaagtcgctactaaaaatgaaagctctgacaaaaaagcccttgcgatcctccttaatgaaggaaaaatggcagcctttggtgccaaatctcgtttctctttcttgtaccaaaccttgaaattcaaaccaactgatacaaaatttgaagactcacgccacggacaagaagtcagctttgaaagtgtcaaagaaatcaaccctgacatcctctttgtcatcaaccgtacccttgccatcggtggggacaactctagcaacgacggtgtcctagaaaatgcccttatcgctgaaacacctgctgctaaaaatggtaagattatccaactaacaccagacctctggtatctaagcggaggcggacttgaatcaacaaaactcatgattgaagacatacaaaaagctttgaaataagccacttcaaactcaatttaatactcaatgaaaatcaaagagcaaactaggaaactagccgcaggttgctcaaaacactgttttgaggttgcagatgaaagctgacgcggtttgaagagattttcgaagagtataaaattttgacattctaaaacgcatcctatcaagttcactcaaacctgataggatgcgtttttatcattttgaaatctatttaccccacctcattccccttcttgatttcgtttaagggaaaagcggtctggaacggggtccttacctgttttcgaccagggatgacaacgtaaaatccgagccaagcccatcaatacccccttaaacccatgtttttcaatagcctgaatcatgtagttggaacaagtcagctcaaagcgacaagagggtggaaagactggtgagataaaacgttggtaaaagcgcacaggcgctattaaaattcgtttcattatttcttagttacagccatggtgtgtagttggctgatttcttttttattaagacgacgggattctcctggacggagtcctgtcaagtctaggtgtccgaaacgagtccgagacaacttatctacttggagaccaacagcttcaaacatctttttaacctgatggttacgcccttcatggatggtcaactgcaccacagagcgatttttgactgggtccactttgagaatttcataaacagctggcttggttttcttaccatcaatctcaagaccacgggtcaaggggcggagattgtccttattggccacacctttaacacgcgcgacataaaccttgtcaatctcattacgagggtgaatcatctcgtctgtaaagtccccatcattggtcaaaatcaagacacctgatgtatcccagtccaaacgacccacagggtaaatacgctctttgacattgggcaagaggtcgacaaccgtcttgcgacccttatcatctgtcacactggaaatcacaccgcgtggtttgttaagcagatagtagaccttttcttcgttgtagataggttgaccttcaacttcgaccttgtcgcctgacttgatagtggttgctagttcacgcaccacttggccgttaaccgtcaccaagccttgcttaatcagctcttctgcttttctcctactggccacacctgcgtgggcaatatacttattgattctcatcttcttctatcctttcaccaaataattggctttcttgggcttgaatctcaagctcatcaatcactggtaattcttctaaatggtttatccccatgtaatctaggaaataatccgtagtcacatagaggttggggcgccccaatacttcctttttcccgtcttcctttatcaggtcaaaagcctgcaactttgccaaggctccactcgagttaactccacggatggcatcaatttctatccgcgtaatcggctgtttgtaggcaataatggacaaggtctcaagggcagcccgagacaagctctggttgataggcgccttagagtattccttcaaaatctctgcaaattgaggcttggtcaccaatctataagcaccacttgtctcaatcaaagccaaactggaatctgggtccttttcatacttctgggctaattttcctaaactttgctggatgcctgtcggtggcagagagaggagttcagctaactggcggacccgaatcccatcttcacccgctacaaacaagagcgcttctatttttgctaaagtactcatctttcctctctatcaagtctagctttgaggcacttgactttcttccttcttttccatgagatagatatctccaaaactctcctcttgcacgaggatcaactcctgggttttgattaactctagggttgccaaaaagagggtgatgacctcttggacattctgggcttccttgaacaaatcctgcaagcgcaattgatctcgtccaatcaaggactctttcacgataatcatcatgtcctcaatcttatactcatcccgcaagatcgtcgtgtgattttgtgcaaactcctcttttttcttggctaggatatttgaaaaagtcaaaaagaggtcaatggtcgtcttgtcatgcacaagctccgcatcttcgtaaatcaactctgtcggcgctttggaataatactgggcccgttcttggtgcttggcttccaagtgctcacccaagagcttgaacttgcgatattcttcgatttgagagaggaggtcctgctccaggtcatcccccaagtctgtcacttctgctaccttcggaaggagtttacgactcttaatcagcatgagctgactagccatgaccatgtactcacccgtcacttccagacgcatggcctgcagggttgagacataggctagatactgttcgatgacttccgtaatgggcacatcgtagatatccatctggtacttagaaaccagatgcaagagcaagtccaggggtccttcaaaatcttttaatttaatatccattatctatatttttctaaggtcaggactgtttttaatcctaatttttttgcaatttcgtacaaatcgaccttgttttctatttgtcttagaataaactgttcacgtaagacttgagctgataaggatggaaaacctttctccttgacaaaagattctaactgacgaaaggcccactgacgagaatagggtttctctcctctttcaaaaagataggtctgccccatcaagggttccaattctgaaagcaaggccgtgggaatggtgacaatcctctgttgggaagccttgctgattcgcaacacctgaaaatccagattgatgtccgcaaccttgatggctaaaatctcactgggcaagagccccatttctaggattaagagcgctagcaagcggccctctggatggtcgctttcctgccaaaaagagtctaggtatagaatctctggcttttccgtcttcttttcagcttgtttggctaattccaagcggtaaaagctgtccacctctcctttttgatagagaaagtatagaaattggttacaggccgaaatctttcgcttctgggcgctgatttttagattggctagctgggcttggtaaatcttgagactggtctcagaaatccgctcacctaccatgtctaaaaattgctccaaatcatacttataggactgcttggaattgacagacaagccctgcttttcctctaaaaaggctgaaatcctgtctctcattggcatcgaatctcatattccttactaaagtcatgcaagagggcattaacggccttgaggatggacttgcgcgtaataatcccttggaaaataccctctgcatccacaaccggtaagaaggactcatctactagcttgtgcaagacctccgtaatggtgaaatcaggcgaaacaaccgctacgtccgtttttgtcatatgaacgatatccgtatccgccatgatttcttggctcaagtcatgctccatctgataagccataatatctctgagtccaatcgtcccaacaaactgtttttcatctgtcacaacgggaacacgggtataggtcatctgactgagcaagagggtcgcatgatccgcattgtgggtatcaatcaacacagctagatttttagcaggggtcaaaaaagtttcctcctgccccaacaagaaagtctcaaactccttggcaatcatcggctaaactccttggacaaacctggatacacctcgtgatctcgtgtcaaaaagtccactttgaagtaactatcatcaatctccacacgagcatagagacattctctgatggtacctcgtggttgactgatagaacctggatttagaaagaggatcttgccttccaaccaagcacttggcacatgcaagtgaccatagaggcagatagcggcctcttcctcctgagcccagtagtccaacttttgaaagttgaaattgatgtcaaacaagtgaccatgagtttggataatcttggtcgaaccaagctcagtcaccagacgttctgggtagccggcgtagaagtccatgttccctttaacaacgcggatgccctcccaaagtggagaatccggacgtagttcagaatcgccgttatgaaaaacagcatcgactttgcccacatagcgatcacggacttcttccacaatcaagctatcgccatgggaatcgctcattacaatgatggtttgctttgccatgatggaaatacctccaaaagtttcttaacggctaaggcacggtgagattgactatttttttcttccagggttaattcagctgatgactcacctgtttctcctacaaggaagaggggatcatagccaaagccattttcacccttaggttcaaagttaatataacctgaccagtctgcttcaacaactaaactttccttatttgggctggctacgactagggttgtgtggaactgagccgagcggtccttgagttcaaagaccatggccaattcgtgcaagagtttggcattattttcacggtcagttgctcccacacctgcgaaacgagctgaccagacgcctggtaagccaccaaggacatcgactttgagaccagaatcatctgccaaaaccatcttgcccgttaattgagaaatggtttctgccttaaggcgggcattttcttcaaaggtcatacctgtttctgctacttcaggcaggtcagggtagtcattaagattttccacatcgtagcctaacttatcaaagatagctcggaattccttggttttaccttcgttacgagtcgcaatcaacaaggtttctctgaccttgcttgtctcaaagaaatcatgaacattgaccccttctttaggcaattctacatacaagagttgcccattttcaaccaagagcagggccccatgacgttgaataacttccaagtttcgtcccatttcttgattaagcatgtctaccacaaaggagaacaaacggtagatagaaccatagcgtaaaacagtaactgaaagcgggaaaccatactcttcatctccaaatattttggagaattcaaacagaggaaaatctgtcttatagtcgctcaaactgttaacgccaccaaaaatactataagacccaacataccagtcctggtcatccttatattcataaattttatttgtcataattctacatgctccacatgaatctctttttccagccattcttcaccaatttgtgcaaaactttggctactggctgttgtgtaaaaacggtgatggagtggtccagcatcgcgaccacgattgatttcaaaataattgagtaagactgagatatcccgtacgcactctgccccactatcgatgagctgaacctttggccccatcacattttggataatagggcgaaggagtggataatgagtacagcccaaaatcaggctatccacctttccaaccaagggacgcagggtttcatagaccaccttcttggtaacactggttgacagggcacctgactcaaccaagggagcaaacttgggacaggccaagctctccacctgtaagtcgggatccagatcatggattttctgacggtatatgtctgattgtaccgtcatgggcgttccaatcactccgattttcccaccttgactggacttgatggctgccgaagctcctggcaaaattacacccaagacaggaatatctagttgagccttgatttcttcccagacgaccgcagtcgcagtgttacaagcaatgacaatcattttgacatccttggtcaagagaaagttgaccagctgccaagtatattcacgaatttgctcagcaggacgggggccatagggcgcccgcgccgaatctccaatatagacgatttcttcatggggaagctggcgcatgagctcgcgcacaacggtcaagcccccgacacccgaatccaaaaaaccaattggtcgattatccatacagtcttctttctagtctttttttctgattgatcgttcattatgattccttgtactgaacgaactgaccgacagcttgatagaatgtcaactacctctctcttaatcataatcaaatatcaatagaatgcaaggaaaaagtctcatccctaaaccataaccaacatagtgagaagtctggaactttcatcccagacttttccttatttattttttctttttattgttagcaagggctgccttttgttggcggatgatttggtggtaaacttgttgtaccttagcttcgcttggtttttgaccatttgcactcaaaagagtacgaactgcttcagcattcaaacgtgggttgtcagcaaattctttttcgatttgcttacgaaccaagtacattcctcctagagctcctcctagaaaagctagcacaatcaatacaattgctaaaagtaaatccatcatttttctcctgtttctttttgagtccctttcattataccacaaactagccaccctgaccagtttgttctacactttcagggatggaatagacagcaaaaagaaccctgcttttctgaaaaagaggtctccttgctaagtttatactcaatgaaaatcaaagaacaaactaggaagctagccacaggttgctcaaagcaccgctttgaggttgcagataaaactgacacggtttgaagagattttcgaagagtattaatttacataaatagccagtgtttgatagggtttgagtagaattttctcagacacttctgcatcttcatagtttgatatcaaaatctgtccattttggtagactgctggcaagtcgatttccacttctttagcataaaagttattgagcactagtaacttttgatcctcaaactggcgttcaaaagcgtagacttgtttgctatcttcaaaggctggtttgtaacttccttctgaaatgattggcatttccttacgcagtcgaatcaagtcttgatagaaggtaaaaatcggaccctggatttcattttctacattgatgtatttataggatttaccagctttcaaccaaggagtgcctgttgaaaatcctgcattttccgaagcatcccactgcatgggaatgcgtgaattatcacgcgacttagcttgaataatctggaaggcttcttgctgactctttccttcttctaagagcatctgataggcattaagcgattcgacatccacataatcagccatagaatcatagtctgggtcaatcatcccgatttcctcacccatgtagatataaggtgtcccacgtgacaggtgaatgctggctgctagcatggtggctccttccttgcggaagttttgaatatcgacaaaacggttcaaggcacgtggttgatcgtgattattccaaaagagggcactccaaccgtctttatcactcatttccttaccccaactatggtaaagactcttcaactcttcaaaatcaaagggagccaaggtccacttttgtccatccttatagtccaccttgaggtgatgaaaattaaaggtcatggataattcctgacgatcaggcgacgaatagaggacacagttttccatggtggtagaagacatttccccaactgtcataaagctatcgtcggatccaaaagtggcttggttcatcatacgcaaatagttatgaacgatgggtttgtctgtataagctggcttcccttcattttcaggacagtccactgaaacctcgtccttaccgatcaaattgatcacatcaaatcggaaacctttgacacccttgtcgcgccagaaattaacaaccttgaaaagctccttacggacattggaattgcgccagttaaggtcagcctgggtctcatcaaataggtgaagatagtatttcccagtatccccgaaaggcgtccatgcagaaccaccaaacttagactgccaatctgttggttggtcttggatgaagaaaaagtcttgataatacttatcaccagctagggctttctgaaaccattcatgctctgtcgaacaatgattaagtaccatgtccagcataaagtcaatcttgtgctctttaccgacacacaccattttctcaaaatcagccatatcaccaaaaagaggatccactgccatataatctgaaatatcgtaaccattatcccgttgagggcttggatagaatggattgagccagaccatatccacacctagtttggctaaatagggaattttttcgataatcccacggaaatccccaataccgttttcagtggtgtctttgtaagattttggatagatttgatagactacttttcctttatcaagtgtcatctgtttctccttttctgataaaagggaggaagcagtcttccgtccctatttgtgctatttcaattatactcaatgaaaatcaaagaacaaactaggaagctagccacaggttgctcaaaacactattttgaggttgcagatagagctgacgtggtttgaagagattttcgaagagtattagattcgtgtagcgaccatgagagatgctccagcttggatcgttgtcggataagttccgggaatagtcgctgtataagcatcttggttggtgatgataacaggagtttctgtcaccagacctgcagccttaatgacatccatatcaaaacgaatcagttgctgaccaactgtaacgtgatctccttggactacaagactttcaaaacctttgccatcaagacctactgtatccataccgatgtggatgagcaattcaactccctcgtcagagacaatgccgatggcatgcttggtagggaaaagaaccgtcactgtcccattaactggagaggtcaactcaccttggcttggttcaatgactagaccttgccccatgacacctgatgcaaaaataggatccgtcgcttgactcaattctttcacttggccagttagtgggctgataatttctaccgaagtaagttctactggttcatggttcacaaattctgcttcttcttgagcaacgaattctgcctgcaagttcgtatcgccctctgtttttgtaaagagaccagccttgcggaagaagaaagtcaagagcattggaacaacaatcgcaactagcatagttcctgcaaatggcagcatgtattgaggttgaatagagagaatacctggcaaaccaccgataccaatagaagccgcagttacattaaaagtaacggataacatgcctgcaagggctgaaccagtcatcccagcaacaaatggataaatatattttacgttaaccccaaaaagagctggttctgtaacaccgagataggctgaaatggttgcaggaagtgaaacctgagcctcacgctcatcatggcgatgcatgaaataataggcaaacacggctgagccttgagcaatattagaaagagcaatcattggccatagggcagtgccaccagcatccgcaatcaattgtgtatcaatggcattggtcatatggtgcagacctgtgatgacaaatggagcgtagagggcgccaaaaattgcaccgaagagccatttaactggaccagttaaacctgccaagacaactgatgaaagtccttgtccaattgtccaaccgattggtcccaaaacagtatgagccaaaatcaaggctggaatcaatgacaagaaaggtacaaaaatcatagaaatgacttctgggatatgcttgtgccagaagatttcaagataagacagactcaaacctgcaagcaaggctgggataacttgggcttggtaaccgatacgattaacagtaaaatagccaaaattccaaacccagtttgccgcgatatcagctgctggcgttgaagcaaccgcataggcattgagcaactgaggcgataccaaacagattccgagaacaattcccaaaatttggctggttcccatcttacgagaaacagaccaagtaatccctactggtaagaactggaagatagcttcaccaggcaaccagaggaagtgattgacacctgcccaaaactgagaggattctgtgatggtcttgccatccaacatcgaccaatggacaccttccaagacattacggaaaccgaggatcaatcctccgactatcaaggctggaataatcggagtaaaaatctccgccagagtggtcataacaccttggaccacgttttgattactcttagctgcagacttggctgcttctttggaaacaccctcaatacctgaaacggctgtaaaatcattataaaagatgggcacgtcatttccaatgattacctgaaattgacctgcatttgtaaaggttcctttaacagctggaattgactcgatagctttaacattagccttcttatcatctcctaaaacaaaccgcatccgtgtcgcacagtgagttacggcagtcacattttctttgcctccgattgcctgaagcagatctttggcttcttgttcaaattttcccatttgattctccttatacttgtcaaagcaagtttgatttgataagtatattgtaaacgataccaaacttgtctgcaacttgtttggtataaaaagggtgtttttttgtaaattttctagcacttgtatggtaaaatagatacaggtgttcattaaactagactaaaaacctatttaagcaggcaaaatgaagaaataccaacaattatttaagcaaatccaagaaaccattcaaaacgagacttacgctgtcggagatttccttcctagcgagcacgaccttatggagcaatatcaagtgagtcgtgataccgtccgaaaggccctgtctctcctccaagaggaaggattgatcaaaaagataagagggcaaggttctcaagtcgtcaaagaagaaaccgtcaatttccctgtatccaacctaaccagctaccaagaactagttaaagaacttggactgcgctctaaaaccaacgtggtcagtctggacaagattattattgataaaaaatcctcactgataaccggtttcccagagtttcggatggtttggaaggtggtccgccagcgtgtggtggatgatctggtatccgttctggatacggactatctggatatggaactcatcccaaatctcactcgccaaattgctgagcagtctatctattcttatatagaaaatggcctcaaactccttattgattatgctcagaaggaaatcaccattgaccactcaagcgaccgagacaagattctcatggacattggcaaagacccttatgtcgtttcgattaaatcaaaagtctatctccaagacggacgccaatttcagtttaccgaaagtcgccataagttagagaaatttagatttgtagattttgcaaaacgcaagaaataaaagactgagacaccagatctcagcctttttcggctctataatatttgtagtgggtaacccccctatggatattatggagcctattttgtgtagaaaaaaagtcccatatgacctataatgaaaagcgacaaaacaactcattagaaagattcatatggaacaattacattttatcacaaaactgctcgatattaaagacccaaacatcaagattctagacatcatcaatatggatacccacaaagaaattatcgctaagctggattatgaggctccatcttgccctgattgtggaagtctaatgaagaaatatgactttcaaaaaccgtctaagatcccttacctcgaaacaactggtatgcctactagaattctccttagaaagcgtcgtttcaagtgctatcattgttctaaaatgatggtcgctgaaacttctatcgtcaagaagaatcatcaaattcctcgtattatcaaccaaaaaattgcgcaaaagttgattgagaagatttctatgaccgatattgctcatcagctggccatttcaacttcaactgtcattcgaaagctcaatgattctcactttgagcatgatttttcgcgtcttcctgagattatgtcctgggacgttgaaacagtccggggagtgactgtttcaatcgggagatggagatgagctttattgcgcaagattttaacaatttcaatatcatcactgttcttgaaggtagaacacaagctgtcatccgagatcactttcttaaatatgatagagccgtccgatgtcgcgtcaaaatcattactatggctatgtttagcccttactatgacttggctaaacagcttcgctttcaaatttctaggctcaggctgaaacagtctcccaggctgtttcactcccgaatgctaaaatcgttcttgatcgctttcacattgtacaacatcttagccgtgctatgagtcgtgtgcatgtccaaatcatgaatcagtttcatcgaaaatcccatgaatacaaggctatcaagcgctactggaaactcattcaacaggatagccgtaaactgagtgataagcgattttatcgccctacttttcgcatgcacttaacaaataaagaaattcttgacaagattttaagctattcagaagacttgaaacaccactatcagatctatcaactcttactttttcactttcagaacaaagaccctgagaaatttttcggactcattgaggacaatctgaagcaggttcatcctctttttcagactgtctttaaaacctttctcaaagataaagaaaagattatcaacgcccttcaactacactattctaatgccaaactggaagcgaccaataatctcatcaaacttatcaagcgcaatgcctttggttttcgaaactttgaaaacttcaaaaaacggatttttatcgctttgaacatcaaaaaagaaaggacgaaatttgtcctttctcgagcttagctgacttcaacccactacagttgacaaagagcctaatttccataaaaattgacatggaaattataaaaccattactagtttagtcctttttgataacgtgccaattcggcttggttcgcccaaacatagtgacctggacggatttctaccatagatggcttatcagtctcatagtcgtgttgacttggatcgtaaaccttcaagaccttcttacgttccaagattggatctgggattggtaccgctgaaagcaaggcttgagtatatgggtgaattggattgttaaacaattcttctgtttctgcaacctctacaataacacccttgtaaataactgcgatacgatctgaaataaagcgaacaaccgacaagtcatgggcgatgaagagataggtcaggccgagctctttttggaattttttgagcaagttcaagacttgggcacgtacagaaacgtccaaggctgaaattggctcatctgcaataacaaagtctggttgcatgaccaaggcacgggcaataccgatacgttgacgttgaccgcctgagaattcatgagggtaacgagtcaagtgctcagcaagaagacctacttcacggataatattttgaactttctctttacgttcttcttcatccttaaataaacggtgattgtaaagaccttcagaaataatataatcaacagtcgcacgttcattcaaacttgcggcagggtcttggaaaatcatctggattcgacgaatcaattccgcagcttgttcacgcgatttcttaccattaatcttttgaccatcaaaaatgatatctccattacttgtatcatttagaccgatgatagcacgaccaatagttgttttcccactaccggactcacctacaagcgagaaagtttctcccttgttgataaagaagttagcatttttaaccgcgacaaacttcttacttccttcaccgaaggaaatttctaaatctttgatttctactaatttttcagacatttccttcctcctagtcagccagatgggcaaatcccattttttcacggatcttatcatggagatttgcaatcacagctggtttttctactttcggagcatcctcatgaagaagccaagttttagcccaatgtgtctctgatactgagaattgaggagctttttgttcgaagtcaatctgcattgcgtagtcagaacgcaaggcaaaagcatcccctttcaggtcagtataaagtgacggaggtgttcctgggattgagtaaagatcccctttatcatcagcaagctgaggcaagctagacaagagactccatgtatatggatggcgagggtcatagaagacttcctcaaccgttccatactcaacgatttctcctgcatacataaccgctaccttatccgcaatacttgccaccacaccaaggtcgtgggtaataaagattgttgtgaaatgatactcgttttgtaaagattttagcaaatcaataatctgagcttgaatagttacatccaaggcagttgttggctcatcacagatcaagacatcaggtcggcaggcaagggcaatagcaataacgatacgttgacgcattcctccagaatattggaatgggtattcattaaaacgtctatctgcgtctggaatgccaaccttattcatgtagtcaatggccaattctttcgcttctttagctgtttttccttggtgttttacaataacttctgtaatctgactaccaattgttttaatggggtccaaactagtcattgggtcctggaagatagtcgcaatcttagcaccacgaatttgttcccaatccttgtgagaagataaagctgtcaagtcctgaccacggtagtcaatactaccttgggcaatacgaccattttcttcgagcatacctgtgaaggtctttgtcaaaacagatttacctgatcctgactcacctaccaaggctaatacttctccttcgactagttcaagggaaacgccgcgaatggctgtcaatactttgtcacgaacgtcaaattccacgacaatatcgcgagcagtcaaaattacatttttttcttttgtcatttctactcctatctatgtgtacgtggatcactagcatccgctaagttttgaccaactacgaaaagggacaaggataccaagacaagggttgtcaatggaatccagaacaagtaagcattggttgttacgttttgtgaataatccgaaatcaaacgacccaaacttggcactgtaatcggtaatccaagaccgaagaaagacaagaaggcttcgtatgagataaagcttggaagcatttgagtcatggttgtcacaataacagataccaattgaggcatgatatttttggcaacaatcttcaaggttggtgttcccaaagtacgtgacgccaagttgtattccaagtcacgatagcgcaagatttgcacacggatcatgaaggcaataccaatccatgttgttacgctcatggcaaaaatcagattccagaatccagctccgattgagtaagtcaagacaataacaatcaaaagaggtgggatgtttgagatgacgttgtaaacttccatcatgacacggtcaactgattttgaaataccccaaataccaccgacaaaaacaccgataaccaagttaatcactgtcgcaatcacagaaatgaggatggagttacgagctccgaaccagacaccgtcaaagagcgatttaccgttactgtcagtaccgaaccaatgctccgcatttggcttgatataacgaacactaaagtcgtttaccttgctgacatcattgaaatcaaacttagaaaacattgggtagatgaaacttatcaaaatgatggctaccaagattcccaacatgactacagttgattttttcttcataaattgtttaaacactgatttccagtaagaatatgctggcgcatcaatagtttcagaggcaaaatcgtcacgttttacaaactgaaatttttctttatcgattgtagacattatttgcctcctttctcagtcaatttaatacgtgggtcaataatagtcatccaaatatctcccaaaagacgtgagaagatagaaatacatgtaaagatgaagacaagaccaacgaccatagagttattagatgcttttacagagtcaatcaacattttacccatacctgggaaggcgaagactgtttcagtaagggttgcaccaccgataaccccaataatggcagcaggaattcctgaaaccagcggaaccatggcatttttaaagatgtgtttgtttgaaatttctttttcagacaaaccttttgcacgagcgaaacgaacaaagtcttgagattgcaagtcaatcatgtaacgacgaatccaaatggctgtaccaggagcacccaacaaaccaaggatgactgctggtaaaacgtaagaacgccaatctccagctcccaagatagggaatgaatctggaagggcaatagatgatccaatcaatcgaacgatgtaaaccaaggcaatcgttggaagagcaagcaagaaggtcaaagcccctgttgagaggctatcaatccaagtgttcttgaaacgagccatggctgaaccaagtggcacggcaagagcataggcaagaaccaaaccaatcaaaccagtaatagcagagctgacaatcatagatggatattggtaattactttcagtcgctgtataaggatcatctttcccatagctagctacttcacgagagtcagcctgactaggtgacttgtaggttcttgagtaaatatttacagaagacgttttcttacctgttgggaactgaacttgggcagttttggtttgtccttgaccttgagtaataacctgaagaactggtgtattagcataggttgggtaagagtcacctaaattcaagttcacaaagttttgatgaacaaatgggaactgactgttaaagtacaagagatatttatgtttagttcctgaaccgaccaatgaccatccgatagctggatcattttcaaaacgaaggtagcgtttcaagtctggattttcagggtcttggattttatttgtatggtcaatgtcaatcaagttagcatagaagtgaaaaacacgttcaaaaattggaatttcacgagtagcatagaattgaccactttcagtaaattctcccaaagtccaaccatgacctaattgattgatgtacttttcataaatagctttattggtcgcatttgcttctactgttacagaagaatccatgctacttgccttttcttgcaactctttagtatcgtaatactcaatgtagcccatacgctcaaacacagtattttcatagttatcacgtttatcagccgttgtcgcaattttattatagttaggatcctgcttgaaaatcaattttcgaggaaccaaggtatagataatcgtgtaggtcaaagtcgttactaagaaaatcgaaaccaatgaccgcaaaacacgcataaaaatatattttttcatattatttcctttaaaaatcccaaaagaaccttctcctcatggagagaaagttctattagaaattatttacttcacatgacttgccaattctttttgagctttctcatttgattcagctttttctttcaaccatttttcacgagctttttcatactcttccttagtcaccactttatcttgtgatttcaaatatttgaagtaaacatctgaccccttagagcctgtttgcgcagaagctccagtaaatggaacaattcgtgaaagcactggtgctgcaccagaagaagccatagcaggaataaagagtgaactatctgtcaaccatgcttgagccgctgcatatttttcataacggacattcaagtcgcttgtctctctggcagcttcatcaactaatttatcgtattctttcaaaccaacttgaactactgaagggctatttggattatcaaatcctaaatatgtttttgtagtttcactgctagttgtttttaaaatatccaggtaagtagatgggtcttgatagtctggcccccatgaaactcctcctgatacatcccaatcctcagatgaagcattggcagcatagtaagtaatattaaggaattcatcacttgtcatttgttgaatatcaacaacgacattttcaacaccaagaactgtttctacagattgtttaaaggactgaatacgagatatgtagttttttgatgcttggtctactggaacgtccagatgaataggaaactgaacgccgtctgcttctaaagctttcttagctttcgcaaactctgccttggccttgtcagcattgaataaaccatcctgcccatcagctaaattcacacctttccactcatcaccataagcaggaagttgagcagcgactaaatcaccaaaggtcttctcaccagctgaaacaaagtctggttttacaaataaattacgaactgctaaagctgctccatctttaccattgatttgagctgagtaagctgagcgatcaagagcaaaattcaaggcttgacggaaatctttgttaagcaatgccttcttagtagctactttctctgaatctgtagttttagaagtatagttgtaactttggcgatcaatattcacacccagaccagcaatcccagagcctgattgtgtgtaatagatattgtccttgtattcttctgcaaccttagaatagttggagctggtagggtaaagacgggcataactataagctccactagtgaagttacgctctagcgactcctgatctgatccatcatagtaagctagattgatagtatctaggtggacattttctttatcccaatattgctcattttttacaaactctacagaagattttgcagtcaaccctttcaacaagaatggaccattataaagcaaggatgtcggatctgttggtttagcaaaatcgcttccttttgatgtttcgaattcttcattcagaggccagaaaatagaataggtcaacttagagttccagaacggttcaggctggttcaaagtgtattgtaacgtataatcatcaaccgccttgacaccaactgttgaaaaatctgttgaagttcctgatagataatctgccaagcctttaaccgaattttcagctaaatacatagcttctgattttttatctgctgcgtgttttaaaccgttcacgaaatctttagccgtcacctctgcatattcttctccatcagaggtaaaccatttaacccctttacgaatcttataagtgtaggtcaaaccatccttagagacttcccaatcctctgcaactgcaggagcaagattaccgtaattatcgttagtgaataaaccatcaatcccatttgaagtcactactgttgtactatttttacttgaaatcaggtagtccaaggtttctgggtctgctgtataaacatagccataagctttaggggctgatgaatcagatgattttgaagaactgcatgctgcaagtacacctgctgctaataaaacaagacctgctgtagcaaatacacgattttttttcattttctactcctctgtttatgtgaattatagattgacaaccattatatcacattatccattaaaaatcaaacaaattttcagaatatttaggcttgttggcacaaatttttcattttttttgaatatatgattcaaattgtcgttcgaagtgtcaaagactacagtgaaaataggaaatttgacgcagaaactttggagtttaggaagacatacagtaaaatgaaatacggacggaacaatgtgattttggaattcaaattaaattataacaatattgtagaagtatcattctagtattcaagattcagtttactatgtcttttcacaccaaccttatcccgaattcaattacttttgtgatttacatatatagattaagactatcttttatactttaaaatttctcgctaccttatccactatatgctcctcgctatcacgtttctattcatagcctacgatttcactattgctttctctgacaattcttatttcctgcgtcagacttaaaacgatctatccccagaccattttaatccgctacctcacgatagtcaggcttggggagcgctattgtattcaccggtagtggagccctacagaggacttacacctcagatgcacgacatgcccatcgtataaaaaatctcctacccaaggtagaagatttcaaacttataaaacttaatccgtcatgtccgataccaacattcgatgctccaatggaatactgcacataactagcaagaaaataaagcctgactgaatccagaagagagccaagtcaaaaattccgtgcacagcaaccactgtaaggaaagatagataaaggccgataatcggacgtttccccgactcctgactcatatccatcatcaagcgaacaggagcaacagaagacaaaactaataaaatagtccccacaattccgtaactcagaatcgtatcaatataaagactgtgggcatgttcatgataaggagcatgtatccgaggataagagttcatataggtcaatggcccttcaccccaaaaaggattttgcttaaacaaggccatcccagcatcccagatagaaatgcgttcttccatagaagagtctaaagtacccattcgaactcccaaatcactagaaaagaggaaactcaaaccaatcgcgaagaccccaatactaagccaaaaggccttccagtttttaatagtcgtaaagagatagataattgctccagcgataatagcaggaaaggcagttcgattttgagtaaagttcaaaccaaagagattaacaaagcctgcaatcacacagaatactttcaaccaattcaacttggtcgttgtaaacagatagaaagcaatcataatacagaaacaacaaataattccataataattaggattaaagaaggtcacttctgcccggttctgatgccacacctgcatattgggtgaaagaaaagcatagttaaatttcttcacaatttggaaatgttctaaactggcaaaagcagctgacaagacactaccaaacaagacaaactgcaaaatcaatcgaaagaatttatgggataaaatcgactgatagtgcaaaaagaaaatagtaaatagaaacattcctactgaagccacaagacccatccaattttgtgcaagaatggatataacagtactatagctaagaaaaagaagcagcatcggatgctcccccattttctgaagaatacttttcatgtctcctgtaaaaatcaaactgataatatataaacagagtacaactacaaaaagataaaagggtaaaaagatactcaggataattcccaataaaatcagctctttactagacaaccccttcagcttttcaataaagcctattgatttcaaaatgaatcctttctctccaaatcagctgattcagataatagtaagctatcctatattgtaccacttttttagcaatttgaaaacaaaggaaacgttttccaaaataaaaaccctattttatccaccatatcaaggcttcaaaatgatacttcaactccattctcaattacccgataagtctgattttgcaaatcaatttctactactgctgttacggacttatctttattttgacgtttgattacaatgctgtgagctgttggtgtctctatctcagtagtcccttctagatcaaaggcttctgaacggttacggaaagaaaatagattgagaagggccttcacaacaggtcgttgcacttcttttgctatttcctcgttgctatagtaatgacgattaatatttcgaccttctttagtttcttctaataatttcaagtcattcttgcctgctaatagacccacatagtaaatctgaggaatacctggggcaaaagcttgaattagacgagcgagaaaatacttgacatcatcatctccaagcgctgaatagtaggttgaattgatttggtagatatctaagttgttatactcggcactagagtacttacgtttgacattggctccaaccttatagagttcatttgaagcatagtcaatctcctcatcggtcaggatatccttgacatctactactccaatcccatcatgggtatctagcgtcgtaaattgcttcatcgggctcatctttaaccacttagccaaacgctctgttctggaactgtaaagagtataaagtgtcaccattggaagagcaaaatcataaacatagtaatcatggtctgctattttaaactgaatcgaatagtgttcatgaatctcaggtaaaagctctgtcccatactcagcagcgatatctcgaactttgtccaataaatcccaaatatctggttccacaaagaaatcattagtatccaatttcttcactgcataagcaaaggcatctagacgaatcaaatcacacccattacttgccaagtgctgaatggtcttacggataaattccatagttacttctttggtcacatcaagatcaatctgctcctcaccaaaggtattccacaaatgttccactgaaccatcttcaaacacaatctcttgctttggtgcacgatccttacgcttgtaaattaaatctacatcagactgtgtcggacggttttctggccaaaacttatcccagtttaaaaagagagctttaaattcactggcttcatgtttttcttgatagtccttataatacttggattgacgagaaatatgattaatcataaaatcaaacataagataatatttctcacctaaacgcttcacatcctcccaatcaccaaaagctgagtccacttcgtcgtagtcaactggcgcaaatccacgatcaactgttgatgggaaaaatggtaaaaggtgaactcctccaatagcatctccaaaatgctcttccaaattatcatataagtctttaagattatttccaaggctatcagaataggtaatcaacatggttttattttgaattggcatcattactctcctttttctaattgaagccaagtctcatatgatctggcttcataaataaaattcattttaaatctctatttatcatcaaactcgtactaatatagactgtgataaacaaagtactactttcttgttttctgcatagaattatcaacaagctaaactcttcctctgtgtcaaagactatagattccatgagctcttcttatactcttcgaaaatctcttcaaaccacgtcagcttcaccttgccgtaggtatggttactgacttcgtcagtttcatccacaacctcaaaacagtgttttgagcaacctgcggctagcttcctagtttgctctttgattttcattgagtattacttcactgccccgttgctcattcctgaaatgatatggcgttggaagaagagatagacaatggtgatactgataatgccgaccacgtaagaggcaaagcttggtccgtagtcgttgaaatattggcctgcgtagttgtattggaacaaaggcagagtccacattttggaatcccggttcaagacaaggagtggcaacatgaagtcattccagaaccaaagggcattgatgatcatggttgtcgcatgcatcggtttcatcattgggaagatgatgcggaaataggttgtaaattgattagccccatcgatctctgctgcttcatccagactttctggaatcgagattttgatatagccaacatagagaaagagggtctgtggaatcgcataggtcaagtagagcaagatcaaaccaaaggtattagccaaaccgagtttactcatcataaccgtaatcggaatcatgatgacttggaaaggtacgaagattccgaggattaagagggtatacatgatggtaaaggcttttcttttactcatattgcgagcgatggagtaggctgccatagggataaagatcattactgcaagtaaagacaagacagtgatgacgacagagttccaataatagcctccaatcccatcagctaagagacggctaaagttgtcccatgtgaagttggttggaaagccaaagaaattatctacaatatccttagtgggtttgaaggaactaaagagggtagcaaggagcggcactaaaatcagaaccgatcctagaatcaatagaatgtatttgccaatcagggcttttctttcatcttgtttcatcatgcttctcctcttaaatttcaaatttcttagatactctcaattggatgatcgaaatcactacaattaagaagaacaagattacggcaatggcattggcataaccgaattggttgtttttaaaggcatagttataaaccaagagcccaagtgaggttgtggcattgtttggaccaccaccggtcatggcaaagacttggtcaaaggcagtcagcccaccttttagggctaggataaagaccatagagacacttggtagcaagtaaggcaattcaatgttccagaaaacttgcttgctagtcgcaccatcaatccttgctgcctctgtaatctcagttggaatagattgcaaaccagctaggaagatgatgatgggcatagccaccccttgccaaagaaggacaaagacagccgcaaagattgctccccacttagtccctaaaagactggtttggaaaaattcaatatgaagggcatttccaatcgctggaagaccgtagttgaagacttgcttgaagatcaaagccactgtcaaaccagataaaacagctgggaagaagaaccaagcacggaagaaggtttggcctttgattttagaattcaagacacgcgcaatgaagatcccgagtgcaatctcaccaaccaccatggcaatcgcaatgattgcggtaaagccaatcgcattcatgaattttggatccatgaagaggagcttaaagttgtttaagccaacaaatttgtagttataagtcaatcctgtccagttggtaaaactgtaaaaggctccttgaaacatcggcacatagaagaaaattgcttgtaacaagagggggatgaccacaaaagcccatgcccaatatttttgtaatacttttttcatagtctctctactcctaatccacatccgctttcatcgggttaaagaaggcattcaaatcattgaccatgccttgtttatcaccggtcaagacatagttcatggtcaaggtatggaagtctgcttcactggtccagtattgttgcaaccagaccaagtgacgatccgtaaaggcatattcggtcataccagcaagcggtgaatcttctcctgcttgtttgaccccttcgatcgctgttggagatccgtccacatcgtagtatttttgcatgacttctggacgggtcatatattccacaaaggcattggcttcttttggatgtttggtggtggctgagatagaccatgccaagtctcccgcaccaacggttaagctttgtcctttttcttttcctggaatcatgaaggtcccaatcttaaagttcggtttttgttcattaatcgctgtgatcgcccaagacccatttggtgtcatgaggacatccccacgtgcgaaggctccgataacatcggtatagccagcaccttcccagttcttttgcttagatccattgatgcgaaggatgtccatgaccttgatatcatctttcataatcggatccgacaatttaatggcatttggttgagaataacgaaggtattgatttgcttcttttcctccacctgttgctgtcgcaaaggctaattgattgtaaccattgagtgtccaagcatctgcacctgcaattccaaatggtgtttgtcctttagcaacgatatctttgactaactgttcaaattcatcccaggtttcaggaaccttcaagcccagttcttcgaatttatctttgttgtagtaaattccataagcattagctgtaaaaggaacgttgtaaactttttcgtttacagcatatttttcagcgtagccatttttcacgcgtttcaggtagtctttgttgctcaaatcttcaaaaacacctgcttttgcccattcttgcagttcgatggactgtgggtaaatattgaccacatcaggcacatctcctgcgagaacgcgtgtcttcaatacttcaccagcatttggtacattgacgactttgaccttgatcttagggttttccttctcaaaatcacgagtgatttcttccaaggttttggtcatttcttttttctggttgaaatactcgatggtcactgtgccatccgcagatttaccatagttggagcaagcgccgagcccaaacaaagctaaacctgtagttgcaagaagtccgatttttttataccattccattagaaagcctcctttataaatttatacacccttattgaactgcaccccaaaagttagacagaataaatctaacttttggggtcagtacatatcatagttttctaaaaatatactgtctactcaaaaaatctccttgggataagataacagttaagcccgcatacattagttctgcacctgagtaaacttcgccattttcctgtaatttatatagtccctcttcatccaaatcttttaattttaaagttgtttccatggtctctacaacagataaaacgcgaacgtaggttacaatcgtttgatttccgtaattaaattgtacagctgcttcattggatacagtatcaggattaattagtctatactgctgtcctaactgaactactggtcgtaattctttatacaagttcacctgattagcaatcgtagctttctcttcatctgataaatttgtcaaatcaagttcatagcccaaatttcccatcattgctacaaggccacgtgtttctaatggtgtcattcgtcccatctgatgattcggtactgctgacacatgagcccccatagaaatggttggatagagataggatgaaccgtattgaattggtaaacgtgcaatggcatcagtattatcactagcccagacttgtgggaaatagcgcatcataccaagatcatttcgtccaccaccaccagagcaggactcaaagagaatatggctgtgcttctctgtcagataagaaacgagttcataaagccccagcatgtactgatgagattgcatctgtgtctctagataagttaatccattccctagcttagtgatattgcggttcatatcccatttaatgtaatcaatatcatgataaaataggagttgatctaagacacttttcaagtattctactacctgaggattggcaagattaagtactaattgattccgagaataagtatgctcatagccaggaacctgaatagcccagtcaggatgttgacgatacaaatcactatctacagaaatcatttcgggttctaaccaaagtccaaactgcaaacctctttcatggatagctgaaatcagactttctagacttccacccagtttttcctcattaacaacccaatcacctaaagcacgattatcatcaaaacgattgccaaaccaaccatcatctaatacaaaaagttcaatgccaactttcttagcttcatctgctaactctaacagtttttctctctgaaagtcaaagtaagtagcttcccagttattgattagaattggacgttcttttttagaaaattcacttagcataatgtgcttcagtacaaaattctgactttcatgactaataccagttaatccctgatctgaatgagtcactaaagctaccggtgtttcaaagtattcctcaggagctaacttccaagaaaagttttctggattaatgccaatagccacccgaacttcattcaattgatttttttgaacaaaagcttcaaagttgccactatacattagttgaatagcaaacacattcccagcatcctctgtgactccttgttcgcatagtagaagagctggtgtttgagcatgaccagaagcacctcggtttgaactaatcgaaaagattccttgttctacctgttgacgtctaacagtcttttcacgagcataagcaccctgcagagttactatttcgtaatctgcagctggaaaatcagccataaaagaaaaatctttatggatgacaacttcctgattactattattatctaatttactgtagctagcaatagtcgcatcattattaaaagtagtataatacaaagtcagactaagttgagccttagaatcttctaacattaagacaagagtctctgtatcgtccatgctatgtggagaaggtaagccctgtggaccattctgaccttttaaaatctttgcttctacaaatcgaaagtctgttacttcagttacactatgctgaacctgtatggttggtttcctaaaatctcctaagccatgttgtccaaaaatctgtcgctgagtatctaaactaaaggttcgattagtagccgttggatttcctgaaaaggcatggtctcgttcataaacactattggaacctttatagttcttaatagtctttcctaaatgtttcaaaagtaagtagccatttcgattttcaataatcaaacttagatttttactctcaacataaaatagattattctctatcctaactcccatttacttcacctcatcactttattgattatattttatcacctgaaatcgctttccaaaatagaaaaatgtctcaagaatatggtaaaatgttaggtaggaggtagcacatgttagttttttcagaataccagactggaacaatcgaccttgccctaagcttttatggatatgaggaatgcacacctaattactcttttggtccagccattcgtgatacatacgttctacattacattactaaaggacaaggaaaatttcattacaagggtaaaattgttgatttaaaagaaggagatttctttctattaaaaccagaggaactaaccttttatcaagcagatagtaaagaaccttgggcctactactggttaggaatcactggagggaaagcccctgattattttgctctttcccaaatttctgatcaatcctatctcatccaatctgaaacttgtcatacccagactactgcaaaactcatctcagacattgtccgcttcgctcagattacaaaatcaagtgaattagctcaactccatatcatgggacaacttcatgaactgatgtttcatctgggaactattgctcccaatcagaaaaaaaagaatatttcatcaacccaccaactctatcttgaatgcaaacgattaattgatagccactatcctcaatcacttacaattcaagatttagcaaaagaactatccgttcacagaagctacttatcaagcgtattcaaagaatttaataccttatcacccaaagaatacctactctacgttcgaatgcaccgagctagacaacttctcgaaaatacccaagagtccatcaaggtaattgcatactcggtaggtttttcagatccactccatttttcgaaagcttataaacaatactttaatcagactccaagtcatacaagaaaagaatactctcaataccaactagtaagaaaggcaacattatgaaatcctaccaagctgtctaccaaatcctatctaaagaaaccgactatatcagcggagaaaaaatcgcagaaaaactatccctaagccgaacagcaatttggaaagccatcaagcgactagaacaagaaggcattgaaattgatagtatcaaaaatagaggatataaactgatgaatggtgaccttattcttccagagattctagaagaaaatcttccaattaaagtcagctttaaacccgaaacaaaatcaacacaactagatgcaaaagaagcaattgatttaggccatgaagcaaataccctctatctagcttcctatcaaacagcaggccgaggccgttttcaacgttccttctactcaccacaaggtggtatttatatgacactccatcttaaaccaaatctcccctatgacaaattaccatcctacacactacttgtagctggagctgtctacaaagccattaagaacctaactttaatagatgtcgacataaaatgggtcaatgatatctatctaaacaatcataaaattggaggaatccttactgaagcaatgacctctgtagaaactggcttagtcacagatatcattattggagtaggtatcaatttcactattaaagacttccctcaggaattaaaagaaaaagctgccagcttatttaaagctacagctcctataacaaggaatgaattgatcatagaaatctggcgtgctttcttcgaaacaccagcagaagagctattatacctatacaaaaaacagtcattcattctaggaaaagaagtcactttcacactagagcaaaaagactacaagggacttgctaaagacatctcagaaaatggaaaacttttagttcaatgtgataacggaaaagaaatctggctaaatagtggcgaaatttctctcaatagttggaagtaaaataacacaattataatataaacgatataaaaataacttcagattagtaattcaattaagttttacggatctgaagttttattggctctaaaaataaaaaagagagttacagactctcattaaaacggagaataagggattcgaacccttgcgccagttacccgacctaacgatttagcaaaccgtcctcttcagcctcttgagtaattctccaattaatgggcacgagtggactcgaaccaccgacctcacgcttatcaggcgtgcgctctaaccacctgagctacgcgcccaagttaaaaaacttggtaatttgaacaaagttcaaagcgggtgacgagaatcgaactcgcgacaacagcttggaaggctgtagttttaccactaaactacacccgcataaatactatcaataaaatggcgcgagacggaatcgaaccgccgacacatggagcttcaatccattgctctaccaactgagctaccgagccttattgcgggagcaggatttgaacctacgaccttcgggttatgagcccgacgagctaccgagctgctccatcccgcgttaataatataaaaggaggatgtgggattcgaacccacgcacgcttttacacgcctgacggttttcaagaccgttcccttcagccggacttgggtaatcctccaatattcaaatggaccttgtaggacttgaacctacgaccactcggttatgagccgagagctctaaccagctgagctaaaggtccgacaagatcattatagcggcgaaggggatcgaacccccgacctcccgggtatgaaccggacgctctagccagctgagctacaccgccatgaatcgggaagacaggattcgaacctgcgacaccttggtcccaaaccaagtactctaccaagctgagctacttcccgagttaaatagaaaaatgcaccctagaggagtcgaacctctaaccgcctgattcgtagtcaggtactctatccagttgagctaagggtgctccatattatgccgaggaccggaatcgaaccggtacgatcgttaccaatcgcaggattttaagtcctgtgcgtctgccagttccgccaccccggcctctctaagcgaacgacgggattcgaacccgcgacccccaccttggcaaggtggtgttctaccactgaactacgttcgcactgttttcttctatctaaaaatgccggctacatgacttgaacacgcgaccctctgattacaaatcagatgctctaccaactgagctaagccggctcatttgttatatcttaatgcgggttaagggacttgaacccccacgccgttaagcgccagatcctaaatctggtgcgtctgccaattccgccaaacccgcatatatgacccgtactgggctcgaaccagtgacccattgattaaaagtcaattgctctaccaactgagctaacgagtctaaaataacttgcgttaccttaaacggtcccgacgggaatcgaacccgcgatcttcgccgtgacagggcgacgtgataaccgctacactacgggacctttgggagttaacgggatcgaaccgctgaccctctgcttgtaaggcagatgctctcccagctgagctaaactccctagagctaagcgacttccctatctcacagggggcaacccccaactacttccggcgttctagggcttaacttctgtgttcggcatgggtacaggtgtatctcctaggctatcgtcacttaactctgagtaatacctactcaaaattgaatatctattcaatttaagaaaaccgttcgctttcatattctcagttactttggataagtcctcgagctattagtattagtccgctacatgtgtcgccacacttccacttctaacctatctacctgatcatctctcagggctcttactgatatataatcatgggaaatctcatcttgaggtgggtttcacacttagatgctttcagcgtttatcccttccctacatagctacccagcgatgcctttggcaagacaactggtacaccagcggtaagtccactctggtcctctcgtactaggagcagatcctctcaaatttcctacgcccgcgacggatagggaccgaactgtctcacgacgttctgaacccagctcgcgtgccgctttaatgggcgaacagcccaacccttgggaccgactacagccccaggatgcgacgagccgacatcgaggtgccaaacctccccgtcgatgtgaactcttgggggagataagcctgttatccccagggtagcttttatccgttgagcgatggcccttccatacggaaccaccggatcactaagcccgactttcgtccctgctcgagttgtagctctcgcagtcaagctcccttatacctttacactctgcgaatgatttccaaccattctgagggaacctttgggcgcctccgttaccttttaggaggcgaccgccccagtcaaactgcccgtcagacactgtctccgatagggatcacctatctgggttagagtggccataacacaagggtagtatcccaacagcgtctccttcgaaactggcgtcccgatctcttagactcctacctatcctgtacatgtggtacagacactcaatatcaaactgcagtaaagctccatggggtctttccgtcctgtcgcgggtaacctgcatcttcacaggtactaaaatttcaccgagtctctcgttgagacagtgcccaaatcattacgcctttcgtgcgggtcggaacttacccgacaaggaatttcgctaccttaggaccgttatagttacggccgccgtttactggggcttcaattcataccttcgcttacgctaagcactcctcttaaccttccagcaccgggcaggcgtcaccccctatacatcatcttacgatttagcagagagctgtgtttttgataaacagttgcttgggcctattcactgcggctgactttaagtcagcaccccttctcccgaagttacggggtcattttgccgagttccttaacgagagttctctcgctcacctgaggctactcgcctcgactacctgtgtcggtttgcggtacgggtagagtatgtttaaacgctagaagcttttcttggcagtgtgacgtcactaacttcgctactaaacttcgctccccatcacagctcaatgttatagaattaagcatttgactcaattcacacctcactgcttagacagactcttccaatcgtctgctttagttagcctactgcgtccctccatcactacatactctagtacaggaatatcaacctgttgtccatcggatacacctttcggtctctccttaggtcccgactaacccagggcggacgagccttcccctggaaaccttagtcttacggtggacaggattctcacctgtctttcgctactcataccggcattctcacttctatgcgttccagcactcctcacggtataccttcatcacacatagaacgctctcctaccatacctataaaggtatccacagcttcggtaaattgttttagccccggtacattttcggcgcagggtcactcgactagtgagctattacgcactctttgaatgaatagctgcttctaagctaacatcctagttgtctgtgcaaccccacatccttttccacttaacaattattttgggaccttagctggtggtctgggctgtttccctttcgactacggatcttagcactcgcagtctgactgccgaccataattcattggcattcggagtttatctgagattggtaatccgggatggacccctcacccaaacagtgctctacctccaagaatctctaatgtcgacgctagccctaaagctatttcggagagaaccagctatctccaagttcgtttggaatttctccgctacccacaagtcatccaagcacttttcaacgtgccctggttcggtcctccagtgcgtcttaccgcaccttcaacctgctcatgggtaggtcacatggtttcgggtctacgtcatgatactaaggcgccctattcagactcggtttccctacggctccgtctcttcaacttaacctcgcatcataacgtaactcgccggttcattctacaaaaggcacgctctcacccattaacgggctcgaacttgttgtaggcacacggtttcaggttctatttcactcccctcccggggtgcttttcacctttccctcacggtactggttcactatcggtcactagggagtatttagggttgggagatggtcctcccagattccgacgggatttcacgtgtcccgccgtactcaggatactgctaagtacaaagactattttaaatacgaggctattactctctttggctgatcttcccaaatcattcttctataatctttgagtccacattgcagtcctacaaccccgaagagtaaactcttcggtttgcccttctgccgtttcgctcgccgctactaaggcaatcgcttttgctttctcttcctgcagctacttagatgtttcagttcactgcgtcttcctcctcacatccttaacagatgtgggtaacaggtattacctgttgggttcccccattcggaaatccctggatcatcgcttacttacagctacccaaggcatatcgtcgtttgtcacgtccttcgtcggctcctagtgccaaggcatccaccgtgcgcccttattaacttaaccttattttctgacctttcagtcataaactcttattaatactacagcgttttcggtttattttcttgttactatttgatatagatattcaattttcaatgtgcattacttggtgatctctcaccaatggagcctagcgggatcgaaccgctgacctcctgcgtgcaaagcaggcgctctcccagctgagctaaggccccacaagacctctcaagactaaacaagaccaatgcgcagttccttatccttagaaaggaggtgatccagccgcaccttccgatacggctaccttgttacgacttcaccccaatcatctatcccaccttaggcggctggctccttacggttacctcaccgacttcgggtgttacaaactctcgtggtgtgacgggcggtgtgtacaaggcccgggaacgtattcaccgcggcgtgctgatccgcgattactagcgattccgacttcatgtaggcgagttgcagcctacaatccgaactgagactggctttaagagattagcttgccgtcaccggcttgcgactcgttgtaccagccattgtagcacgtgtgtagcccaggtcataaggggcatgatgatttgacgtcatccccaccttcctccggtttattaccggcagtctcgctagagtgcccaactaaatgatggcaactaacaataggggttgcgctcgttgcgggacttaacccaacatctcacgacacgagctgacgacaaccatgcaccacctgtcacctctgtcccgaaggaaagctctatctctagagcggtcagagggatgtcaagacctggtaaggttcttcgcgttgcttcgaattaaaccacatgctccaccgcttgtgcgggcccccgtcaattcctttgagtttcaaccttgcggtcgtactccccaggcggagtgcttaatgcgttagctacggcactaaaccccggaaagggtctaacacctagcactcatcgtttacagcgtggactaccagggtatctaatcctgtttgctccccacgctttcgagcctcagcgtcagttacaagccagagagccgctttcgccaccggtgttcctccatatatctacgcatttcaccgctacacatggaattccactctcccctcttgcactcaagttaaacagtttccaaagcctactatggttaagccacagcctttaacttcagacttatctaaccgcctgcgctcgctttacgcccaataaatccggacaacgctcgggacctacgtattaccgcggctgctggcacgtagttagccgtccctttctggtaagataccgtcacagtgtgaactttccactctcacactcgttcttctcttacaacagagctttacgatccgaaaaccttcttcactcacgcggcgttgctcggtcagacttccgtccattgccgaagattccctactgctgcctcccgtaggagtctgggccgtgtctcagtcccagtgtggccgatcaccctctcaggtcggctatgtatcgtcgccttggtgagccgttaccccaccaactagctaatacaacgcaggtccatctggtagtgatgcaagtgcaccttttaagcaaatgtcatgcaacatctactcttatgcggtattagctatcgtttccaatagttatcccccgctaccaggcaggttacctacgcgttactcacccgttcgcaactcatccagagaagcaagctcctccttcagcgttctacttgcatgtattaggcacgccgccagcgttcgtcctgagccaggatcaaactctcattaaaaagtttgagttcttactcatttctgtcactgacagatttattgtttttttcattgttcagtactacaacttacgttgtagcgccctgcacattggttcgtcttgttcagttttcaaaggtctttgtcacttgcttctctcaagcgacaactatattagtatatcacaactgctttcgcttgtcaacacttttttgaagatttttaagtttttttaaactttttttcatcaagtggtcctgacgcaacataccatagtccgtacgggattcgaacccgtgttaccgccgtgaaaaggcggtgtcttaaccccttgaccaacggacctgagttgttattttcaactcttactattatacagtcttttcaaactttgtcaactacttttttaaactttttttattaattttacaacagcttcagttcgagctgtatgtgggaacatatcgaccgactggatataatgaagatcatagacttctactaagcgtaccaaatcacgagccaaggtcgaaacattacaagaaatataaaccattttttctggtacataagtaagaatagtatctaataacttatcatccagacctgtacgtggtgggtcaacaatcaaagcatctgctcggtagccttccttgtaccaacgaggaataatctcttctgccgttccagcttcataatgagtattgtcaaatcccattcttttagcatttcgcttggcatcttcaatagcttctggaataatatccatacctctgagtgtttttactttctttgcaaaggcaaatccaatcgttccaactccacaataagcgtcaatcaaatggtcttctttatcaacatccagcgcttttactgcttcgctatagaggacttctgtttgctcaggatttagttgataaaaagctcgaggggatagtgaaaattcataattgagtacaccttcttgaatactctcttgcccccagataatctctgtcttttcaccatatatctcactggttttagctgtatttgtattaacagctactgtcacaacttctgggaaatctttaaccaactcttttaccaattgagttaaattaagctggcggtttgtaacaataataatctgaacctgtccggtctttctcgcgcgtcggaccataatagtacggacacctagaacttttctctcatccgtgattggaatctggtgataagtaagtaattctgctaagcgattagcaatcacttgggtttccttatcttgtaccaggcagtctttcaactctactaaatagtgagagttttgtgcatataagcccgccttgacctgatttttaaattttcgagtctgaaattgtaacttagctctgtaatattttggttcctgcattccaatagttggacgaatttcataattttcatatcctgcaggagcaaattttttcagcgcttgatgaagtaagtccgtcttgaactccagctgcttatcataatgcaggtgcatgatttggcagcctccgcattcattataaatagtacaagatggcacaattcgaaatttagacttcttgttgaccttcagtaattttgcttcaacaaagttgcgtctaatagaagtaatctgacaatagatatcttcgcctttgagagctcctggtacaaagactaatgttttttggtaaaagccgattccctcaccgttaattcccatgcgcttgatttttaatggtattttttgtttcactttcagattcatacccctatcttatcacattttgagttataatagagctatgaaaatcacaaaacttgaaaagaaaaaaagactctatctgatggagcttgataatggcgacaaatgctatatcaccgaagacacaattgttcgttttatgttatcgagagataaggtgataagcgaagaggaattgaaagagattcaagactttgctcaattttcttatggtaagaatctggccctctaccacttatcctttaaagcacgtactgaaaaagaggtcagagaatatctgaaaaaatatgatattaatgaaaacatcgtttctcaagtcattgctaatcttaaagaagagaagtggattaatgatagccagtacgcttatgctatcatcaatgccaatcaactttcaggagacaagggaccttatgtactgactcagaaattagcacaaaaaggaatttcaaaatctactatagaagaaatcttgaatgattttgatttttcggaagttgctcaacgtgtagccaataaactattgaaaaaatatgagggaaaacttccagctcgtgccctgcaagataagattatccagaacttgactaacaagggcttctcttattttgatgctaaaattgcctttgacgaattggatagtcaagttgatgaagaaacgactcaggaactcatcttcaaggaacttgataagcaatatactaagtatgcccgaaagtatgaaggatacgaactgaagcagcgtttaactcaagttttagcacgaaagggctacgatttttcggatatagcaagcgctcttagagaatatctttaatatttccaagtgaaattcacagattttgggtaattttatggtacaatagtaaatgataaacttataaattgtagaaagttggttagttatgaagcttccaaaagaaggcgactttattacaattcaaagttataagcatgatgggagtctccaccgaacttggcgggacaccatggtactaaaaacaacagaaaacgccattattggtgtcaacgatcatacacttgttaccgaaagtgatggtcgtcgttgggtcactcgagaaccggctattgtttactttcacaagaaatattggtttaatatcattgccatgattcgtgataatggaacttcttactattgcaatatggctagcccctactatctggatgaagaagcactgaagtatattgattacgatttggatgttaaaatttttacagatggggaaaaacgtctcttggacgttgaagagtacgagcgtcacaaacgcaaaatgaattattctgatgacttggactatattttaaaagaacatgtcaaaattcttgttgattggattaacaatggacgtggtcctttctcagaagcctatgtaaacatttggtacaagcgctatgtagaactaaagaatcggtaaagttgtcaaaggtcaggaacaaaatcctgaccttttttggtagtataaaataaattgtgtaaacacaaaaaggaataaatctattatagcagagttacaacacattactagaaagagatttatgcagaattcgtaaaatatataaaacaaatagatatactgttattttttaatgtctttattccttgtaagtttacaacaaacttatatcgtttaatacaaaaaatacgaaaatgattagtataaaaaatacaggtcaacttcgtatcaaaaacatttttttgtatttccacatagcatcaatcatttagtacaatattttaaaaacaatatctcaacagagaaaatgctatttaatctatcagctcatttaatcgtttttgaaaatataaagcaatacttttagattcaataaactcaaaatattttatgacattgtccatttgtttaattccagattctttagattctgtcaggtatattttatatccttctacaaatttgaatgtagatttttcaaaaacttttgtgtcatcctttaataatttttttaatttcatttcaaagtagtctgcatatattagatgtgaattttcggctctataatatttgtagtgggtaaatcccttatagatattatggagcctattttgttgtagaaaaaaagtcccatatgacctataatgaaaagcgacaaaacaactcattagaaagattcatatggaacaattacattttatcacaaaactgctcgatattaaagaccctaatatccagattttagacatcatcaataaggatacacacaaggaaatcatcgccaaactggactacgacgccccatcttgccctgagtgcggaaaccaattgaagaaatatgactttcaaaaaccttctaaaattccttatcttgaaacgactggtatgccttctagaattctccttagaaagcgtcgtttcaagtgctatcactgttcaaaaatgatggttgctgagactcccctggtaaagaaaaatcaccaaatccctcgtatcatcaaccaaaagattgctcaaaagttaattgaaaaaatttctatgactgatattgcccatcagctggccatttcaacttcaactgtcattcgcaagctcaatgactttcactttgagcatgatttttctcggcttccaaagattatgtcttgggatgagtatgccttcactaagggaaagatgagtttcattgcgcaagattttgataatcttaatattatcactgttcttgaaggcagaacacaagctgtcatccgaaatcactttcttcgctacgatagagccgttcgttgtcaagtgaaaatcattacgatggatatgtttagtccttactatgacttggctaaacagcttcgctttcaaatttctaggctcaggctgaaacagtctcccagactgtttcactcccgaatgctaaaatcgtgttggatcgctttcacattgtacaacatcttagccgtgctatgagtcgtgtgcgtgttcaaattatgaaccaattggatcgaaaatcccatgaatacaaggctatcaagcgctactggaagctcatacaacaggatagccgtaaactgagtgataagcgattttatcgtcctacttttcgtatgcatttaaccaataaagagattttagacaagcttttgagctattcacaagacttgaaacatcactatcagctctatcaactcttgctgtttcactttcagaataaggaaccggagaaatttttcggacttattgaggacaatcttaagcaagttcatcctatttttcagactgtctttaaaaccttcctcaaagataaagaaaagattatcaacgcccttcaactacactattctaacgccaaaccggaagcgaccaataatctcatcaaacttatcaagcgcaatgcctttggttttcgaaactttgaaaacttcaaaaaacggatttttatcgctttgaacatcaaaaaagaaaggacgaaatttgtcctttctcgagcttagctgacttcaacccactacagttgacaaagagcctataaaaagaagggttagtcattccctccttttgtgttttttataagttgttttctatagaaagcttacatcatcccgcccatcatgcttggatccattgctggagctggggctactggttctggtttattggctacgactgcttctgttgtcaaaatcaagctggctacagatgctgcattttgtagggctgaacgactcactttaactggatcaatgataccttgatcaatcatgttaacccactcgccagttgctgcgttaaatcctataccaagctcagcatttttcaaacgatcgataacgatagatccttcaaatcctgcattgtgagcaatttgacgaacgggttcttccaaagcacggagaacaatattacgtcctgttgcttcatctcctgtcaattccaaggtagcaacagctggaatcacattggcaagagctgttccaccacctgcaacaataccttcttcaacagctgcacgagtagcgttgagggcatcttcaatgcggagtttcatttctttcaactcagtttcagttgcggctccaaccttaataaccgctacaccacctgacaatttggccaagcgttcttgcaatttttcacggtcaaattcagaagttgtagtttcgatttgagacttgataaccgcaacacggtgagaaatcgcttcaggatttcctgcaccttctacaataaccgtgctatctttgtccacggtcactctcgctgcttgaccaagagcttcaattgtcgcatctttcaactcaagaccaaggtcttctgtgataactgttccgcctgttaagatggcgatatcttcaagcatggctttgcgacggtcaccaaaaccaggtgccttgactgctactacgttgaaggttccacgaatcttgttcaaaacaagagttggaagagcctcgccatccacatcatccgcaataatcaagagtggacgattgctttggagaatgctttccaaaagtggcaagatttcttggatattggaaattttcttgtctgtaatcaaaatgtacggattttcaaggtcagccaccattttttcgctatctgtcaccatgtactgtgaaaggtaaccacggtcaaactgcattccttctacgacttcaagctctgtttccataccacgtgactcttcgatggtgatgacaccgtctttgccaactttttccattgcttcagagatgtactcaccaactttttcagaacgagaagatacggctgcaacttgagcgatagcttctttattggcaacagggatggcgttgtttttcaaagcttcaactgctgcggcaactgctgtttcaatcccacgacgaataccgattggatttgcacctgctgtgacgtttttgattccttcacggacgatagcttgggtcaagactgttgcagtcgtagttccgtcacctgcgatatcattggttttagaagctacttctgatactaacttagcacccatattttcaaaatggtcttccaattcgatttctttggcaatggtcacaccgtcattggtaatcaagggtgaaccgaatgacttttcaagaacgacattgcgaccttttggtcccaaggttactttaacagtgtctgcaaggatatcgacaccacgaaccatggctgaacgggcatctgatgaaaatttaatttcttttgacatacttactttctccttctattcctcaatgattgccaaaatgttagcttcgcctacgatgatgtacttttcatcgccatctttgacatcaagacctgcgtgggcttcaactaagacacgatctccagttttaacacttggagcaaccaagtcaccgttcaaggtacgaacaccttgtccagtagccacaacttgagctgttttggttttttcttgggctgagcctgcaaggacaaagcctccaacagtttgttctttttcttctatttttaagaccacacggtcccctaatggtttcaacatctgatttcctccataatgagatagatattattagcactctttgaacttgagtgctaattcatagttctattgtatcacttggtcagaaataatcaagaaaaaagtctgactttctcaagataaaaagcctgagaccaactcagactttttaattcttaaaatggcaattcttcctcttccaagaccaaatctgccaaatcttggcctgcattattttcacgcatagcacgttgggcacgactttccaagagttggaatcctgtgacaagtacttcggtcacgtagttcatttggccatttttctcaaagcgacgggtacgcaattctccatcaacggaaatgagactacctttggttgcgtagcttgccaaagtttctgctagtctgccccataggaccatattgacaaaatcagcttcacgttcaccgttttggtctttgtaacgacggttcacagcgatagttgctcgcgctaccgacttgtcattgttggttttgtgcaattctggtgtagacgttaaacgtccaatcaagataactttattatacatattttcttcctcctacttatctattcgtaggaaatcaaaaaaagttacagaaatttgtaacttttcgagaaaattttttattttttatgaaccatgaaacctgtcgcctgttgattggccataatggtcatatctgtaatctgaacacgacgaggttgactagtcacatagactactgtatctgcaatatcctgagcttgcaaagcttctattccttggtaaacggacgcagctcgttctttatcaccatgaaaacgcactgtagaaaaatctgtttcgacaattccaggctgaatggtcgtcaccttgatatccgttgcgatggtatcaattcgcagtccatctgaaaaggtcttaactgccgccttggtggctgagtaaacagctgcaccagcataggcataaattcctgcggttgaccccatattgataatatgaccttgattggcttttaccattgctggcaagaaacagcgagtgactgccatcaaacctttgacattggtatccaacatggtcagcatatccaactcttcatagtcttgatagggagctaagccaagagccagtcctgcgttattgaccaggatgtcaatctgacctatcgtttctaaaatatcagagcagacagtctttaccattgtcatatccgtgacatctaggagaaaagtccaaactgtttgatttggaaaagtttctgcaaactccgccttaagagcttctagtctgtctatccgtcgtcctgttagaacgacatcctcaccctgctccagataagcacgcgcaatcgcttcaccgattcctgatgtcgctcctgtaatcacaacattttttgccatcttatttccttctagctggtctatcagatattaacaacttcttaggcagtccagtgtttcgctgggtcgaacggtgttccgacaacttggtcttctgataattcaagcaccccacgtttttgtggagcatttggcagatgcaattcacgaggactgcacatcataccaaaactcttttcaccacgaagttcacctgggaaaatgagattcccttttggcatcatagctccaggaagcgcgacaatggttttcaaccccacacgcgcattgggagctcctgcaacgatttgtacagtcttatcacttgcgactgcaacttggcagatgttgaggtggtcactatctggatgggctaccatctcaacaatttcacctacaacaaacttaggttccttatcattaacaatttcttctgtaaaaccttccgcctgcaactcttggttcaaacgagcgacttgctcatctgtcaaaaagacttgaccgcgctctgcaatttcaaataaacttgaaacttcgaaaatattccaagccactgtttccccattatctttgagaaaaacacgggctaccttgcctttgcgctccacatccagtttggcatctccgctatttttcacgatgaccataaggacatcaccgacatgttctttattatatgtaaaaatcattgtttcctttttctcctatttcagtcctgctaaaaagtcattgatttgttgcttgcttttacggtcgcgattgacaaaacgaccgatttccttgtccttttctagaacaacaaggctaggaattccgtaaacatcccagagtttggccaaatccatatactgatctcggtccattcgaataaaggtgaactctggattggtctcctcaatctctggtaaggcaggataaatataacgacaatcgctacaccagtctgccacaaaaatgaagaccttcttgcccgctttttccactaaagatgctaattcttctaaacttgctggctgtatcataagacttcctcctcatagactaggtcttcattttcatagacaaaggtataatgacggccatcctcaaaaatgacgccaccaaccaagctctccagactgctttcgtaaacttgaacataaagggtcgcaatttcccccatgtcggaaaaatggtctcgcacaatctctgtcaactcttcctgagtcttcatgagcttacggtcatctgcaacttttttcgtagcaagagcaaggcttccgatacctagcagagccaagcctgccatccacatttttttagctttcataccattcattttaacacaaaaaaggcttcaggacaaatgaggaagcagcagaaaagcaagtaaaaagcctcttcctttaaggaaaaggacttcttatactcaatgaaaatcaaagaccaaactaggaagctagccgcaggctgctcaaagcactgctttgaggttgtagatagaactgacgaagtcagctcaaaacactgttttgaggttgtggatgaagctgacgtggtttgaagagattttcgaagagtattattcttattgccaggcacctaagttgccaacgtagtaactatcaggtgtgtaggtattgcgaagcatcttacctgatgaagccagataatactacttgccattgtctttgacccaatcattcgcaatcatggaaccagaagaacttacataataccattctcccttgtcataaacccaagtactgactttcatggttcctgagcaattaaaggcaaaaaaactgtccaatatcattcgttttttaaaagcatttgacactacatcatctacgctgtagtacatagatacatcaaacgtaaaagccaaaatatcgaaaaatatacaacttttaaaggcagcatttcattttttaaagtctaacaaccatagaactgaaatcagagcaaggcatcaatttcctactcttagtacgtctattttgatggttgaagtgaagatttttttatttaacgtagacaatttccaacttcccaaaagccacatctccacggataatcaaggttttgctggttggggctacaggagcgtcagccttagctgcaccaaaggaggtttctactttcaaatctacacgccagtgttgtggaacatagacggttgcattcccgaaggccacttcaatatttaaagttgcaaaatcacctagcatctctgcattatcatagtagattttagcatccccaaaagcgacttccacttggtcatctacgagatcttgatcttgcttatagaaggtcccgctaccaaaagcgacttccttatccgtgacgactgtttttttcccattgtaccaccattttttttcattccagaacttacttgaatgcgtcagataaccaacaccaagtaccaccaagatgctagcccaaataagagaatgattggtaactggtaacaagtcataagcgtaatttgcaatgatgagcgccagtaaacctgtaaaaactgccgaagtgagatgacgtctaaggatggactcaatggacttataagcaaaaaaaacaatacctagtaaaggccatattttaccatccaaagaaggaattccaaaattcccttgcagcaagatccaagctgctaaaaccaataaaacaataccaaatgctttctttttcatgttttttacctcatgtttcttagattttcttttaggagggattggtaatgccgtgagacatgaacctccttgtgcgtctgataaaaggaaatggtgcccgttcctgaaaaggacttgtccactgagtaaatctgacggatgtttgcgatcgttgacttggaaactcgattaaaatagcgaggcaagatagactccaactcatagagcttgaggcgaacctcataagcttccttctggttatgagcgtagatcttgctcccttctgtttcaaagaagagaatttctgacaggtctagataatattcacctgtccccttgtaaaaagtcaacctcggagcctttgactcttgcaagaggcgttgcaagtctgcaatttcatctgtcaaagtgggggtcttgatgacaatttcagtctcctctaaattgccgtcaatctcaattcgtaacttcatcacatctcctttctgactctactatatcaaagctaagttaggaatacaagggcaaaaaagcaagtggtcaatttgaagcagtaagtggttgtaggactagcttaacttacatgtcagaataggaagaaaaggaatccccacaccaaaccacaagcatagccaaccaagacatccttgggataatgaacaccccctaaaaccctcaccaaccccagcaaagctgaaaagatcaagcatactaagccaataggtagactagcatgcagacaggccatggagatgatagttgccgaaaagacatggcgactgggcatcgaccgtcccgaactatccttatcaagaaggggacagatatcccaagtttcataaggtctcgggtgattgattttcttacgaaacagggacaaggccacaaaacctgatgcaggaataagcacataaaccccaacttgctgaccaagtcctagttgcaggtaagtggtgactagcaagatcagatagaccaggggcatggcgactgtcatcaaacgattgaaactgcgtaataggaataaaagaattggacaactagttagtctggagctgatatttcgataccattcttgataatttttcatttatgcttctcatacttttctagaacttgttgagatgttttccccttggcaagccaatccactagcttgtccaagcgacgtatttcctgcatcagaggatcatcaatttcctcaatacggacaccgcaaatcttccctgtaattgcaattcgttcagggacataatatggtgcttgtctaaaaaaatctccgtaagtaacatccctatccagacaagcaagaacatcactcacttcataccctgtcaaccaactggtcacttggtgaactgactctgcctttccaccctttcgctcaacttttgcaatcaaggctaagtagacagcagcaaatttcatattgtataatttctgactcatacttctctctttctatgtgtactagtataaataagaaaaagaaggccgtcaagccttcttttgatttattcttctgcttcatcttctgtaaattgactattgtacaagtcagcgtagaagccaccttgcgccatcagttcctcatagttgccttgctcgatgatatttccatctttcatgaccaagatcaagtctgcatttcggatggttgacaagcggtgggcaatgacaaaggatgtgcgtccttccatcaaacggtccatggctttttggatcaattcctctgtccgtgtgtcaacagaagaagtcgcctcatccaaaatcaaaagcggtgcatccttaagaagggcacgagcaatagtcaatagttgtttttgtcttacagacaaggtcacggtgtcatccaagatggtatcatagccatctggcaaggtcataataaagtggtgaattcccacagccttactagcttccatcattcgttcatcactaatccctatttgattatagatgagattgtctcgaatagttccttcaaagagccaggtatcctgcaagaccattgaaaaggcatcatgcacttctgaacgcgtcatagccttggtatccacaccatcaatgcgaatacttcccttatcaatctcatagaatttcatcaaaagattgacaatggttgtcttaccagccccagtcggcccaacaatggcaaccttttgaccagcatgagctgtcgcagagaagtcatagtcttgaacattgacaccgtccaccagaatttctcctgctgacacgtcgtagaaacgtggaatcagattgaccagagttgatttaccagaacctgttgacccaataaaggccactgtttgaccagtttctgctttaaagctaacatgttcaataactgcctccgaatttgccgcatagcggaaggtcacatccttaaactcgacctgacctttgaagttttcatcagtcagctgcacttgaacagggttttggatagaagaatgcaaatctaaaacttgattaatccgcttagcagagaccatagttcggggaagaacgatgaagagtgctcccatgagaaggaagcccatgacaacctacatggcataagacatgaaaacaatcatgtcactaaagagaggcagacgcgctatcggagcagcgtcgttaatcacataggccccaatccagtaaatcgccacactcaaaccacttgaaatccccatcatgataggattcaaaatagccataagacggttgacaaacaaattcaaacgggtcaattcatcatttactgctgcaaatttttcattttgataatcctctgcattgtaggcacgaacgacacgaatacctgttaaactctcacgagtgatactgttcagtttatctgtcagcccctgaatcaaggactgttttggaaaggctagcgtcatcaaaacggtcgtcatcaggacgttgataatcactgccacaagtacggcccagagccagtattctgaatgacctaaaatcttcccaatagcccagatagccataattgaaccacgcgttaccacttgcaagcccatagtaatcaacatttgaacttgagtaatgtcattggtagtacgcgtcaagaggctaggaattgaaaatttcttaatctctgtctgcgagtaatccaaaactcggttaaaaatatcacttctcagcctactagtataagaagccgccactcgggatgcaaaaaatccaactgcaactacggacaagaaggcaagaaaggacattcccatcatcatgcttgccgactgccacaactcatctaaattagtttcttgactacctagcaaatccgtaattttcgagatataggtcggcacttccaactctagatagaccgaaaagcaagtaaagagaatggctagtaaaatcatcccccattcttttctactaattcttttggctaatttctttattctctcctcctattcccttgatattttgcctgtagttgaccgagaaccttctcaaaaatcagtaattcatcttcatcaatgtcttccatcaactgcttgtctatgcgttcaaaaaaagccttaacctgttgcatctgagaacgtgctttgtccgtcagacgaacaaacttagcccgcttatcaacaggactcgcctccaattccaccaaaccattttgcactatacgcttaaccagattactagcaacaggcttggtaatattgagttcctgctcgatatctttaatcaagaccaagtcttggtttttctcgcgattatccaaaaaacgcacaacctgaccttgcggcccacccataaattcaatgccgcaacgtttggcttccttttgcaccatcaggtgaatttgatgaccaaaacgcttaaagactaacatcggtttatccataatctcccccttctaaataaaaatagttctctggagaataattaaatttctatgagaactattttcttgattaaaaaaatcccaagtgattttctcacttaggatcatgttctataggttaaattaaaacccatctacgttcgtataaatcttttggacgtcttcgtcgtcttcaagaacgctgtaaagtttttcaaaggtttcaaggtcttcgcctgacaattccacttctgactgaggaatcatttccaattcagtcacttggaattcttcaataccagactcacggagggcaacgatagccttgtgaaggtcagttggcgctgtgtaaactgtgattgtaccttcttgtgcttctacgtcatccacatccacatccgcttcgagcaattgctcaaagactgcgtccgcatcttcacctccaaatacaataacacctttgttgtcaaagaggtaagaaacagaacctgaagcgcccatgtttccgccgtttttaccaaaggctgcacggacattggctgctgtacggttgacgttagaagtcaaagtatccacaattagcatagagccatttggcccaaaaccttcgtaacgtccttctgtaaaggtttcgtctgtgtttcctttggctttatcaatcgctttatcgataatgtgttttggcacttgggcttgtttagcacggtcgataacgaatttcaaagctgagtttgattctggatctggatcaccttttttagctgctacatagatttctacaccaaattttgcatatactttagagttagctccatctttagccgttttcttggctacgatattggcccatttacgtcccattaggaatctccttttttcacattttaatctttcttattataacacaagtttttttgattttcactagaggaaatggattttattagcaaatcaagctaggatagcactttacctgctaagatggtcttgcctttctatctttatcaacaggcactcatccacattcaaaaaacaaactagaccattatctgcaaatagaaagtttcagccaagtttgacaaagtcagctcaaattactgtttgaagtttgtagatataagcgacaaaaacaatcatactgcaccttttgttgacagtctactccagacatatcatagttcaagtaaatactttgaaattcaacagttcttataggcgctattgtattctaagaaatcaatagaagagtttctaagcaaacctctaatactcaataaaaatcaaagagcaaactagaaagctagcctcaggttgctcaaaacactgttttgaggttgcggatggggctgacatggtttgaagagattttcgaagagtataatttacgtgttcccaagatggagaagttagactagtacactggcacttctaaaacattgctagcaattgatttgttcatatttaatttcattttttccataaatgggtattagatataaacagcaaaatatttccgatacgtgtcgttcttgaatttccaatcatctaaaacaagtaaaggataatcaatcccctgtatatcaaggaattggctaccctttttacttttttacacattctgtttgatagattcattttaacatcacgagcatactccaatggaaatcgctaggcaagagataaactttcagatatccgcagagagatcatcgcctctttttgtcgcaagcattctcctctcctagtcattttctaccttatcttctacctgaggatagagagttgttccccaaatagaaatcgtccgcttacgcactagtggcaaatcggttttttcataaaccgtacgccaccattcccaggcaagcccggtacactctctaattttgacagagagattacgaacattcccttttaaaggaatactagtggtaaagtgagccgttaaatcctgcccatttctgtcccaagccttaggagtcaagacttccttaccttgatgatcataggataattcattccaagtaatataatattgggcaacataggcaccactatgatccagcagtaaatctccgtttctgtaagctgtaaccttagtctcaacatagtctgtactattttgaaaggtcgcaactacattgtcacgtaaaaaagaagttgtataggaaatcggcaagcctggatgatctgctgtaaagcgactgccttcttgaatcaagtcctctaccatatccaccttgcctgttacaactcgggcacccgaacttgggtcgccccctaaaataaccgccttcacttctgtattgtccaaaatctgtttccactctgtctgaggagctaccttgactccttttatcaaagcttcaaaagcagcctctacttcatcactcttactcgtggtttccaacttgagatagacttggcgcccataagcaacactcgaaatatagaccaaaggacgctctgcagaaattcctctctgttttaaatcctctaccgttacagtatcttgaaacacatctcctggatttttaacagcatctacgctgactgtataataaatctgcttaaaattaacaatctgaatctgcttttcgcctgaatggacagagttaaaatcaatatcaagagaattccctgtcttttcaaagtcagaaccaaacttgaccttgagttgttccatgctgtgagccgtgattttttcatactgcattctagctgggacattattgacctgaccataatcttgatgccacttagccaacaaatcgtttaccgctccgcgaacacttgaattgctggggtcttccacttggagaaagctatcgctacttgccaaaccaggcaaatcaatactataagtcatcggagcacgatcgaccgcaagaagagtgggattattctctaacaaggtctcatccactacgagaagtgctccaggatagaggcgactgtcgttggtagctgttacagaaatatcacttgtatttgtcgacaagctccgcttctttctttcgataacaacaaactcatcgggtagctgattaccctctttgatgaaacgattttcaatactttctccctgatgggtcaagagtttctttttatcgtaattcatagctagtataaagtcatttactgctttatttgccatcttctacctcctaataagttcctggattgagttgcataaactcagacttgttcagcgaaatcagccgtggttggactaagtaatccaaaatttcctcgtacaattcttctgagacattgcgtcgccgtctggctaaataagaagtcggaatgaccgtattatccaacataaataccttatctaagtcaatcaaggttggtcttgtaaaaggattacgagctagatccggctcttctatcataaagttcttgaccaaacgtctggtcaagagagctggtttgaaggtctgatttttaaccaactctttgtttttagtcatgctgttgtcaatacagatatacatatgattcttcacagccaaatcgctactaatagtcggaaaaggcaaataaagagctacaacatctcctctcttaatcaagcaagagcacccccttttctcctaatgtaacatagacaggattgaccaagtcttctgattgactcagaatttccaaagtttgagtttggcgcgctgtcaatttagtagcatcttgtctcttcaatacaaaatgcttgtcgccaataaccttgacaatataatccttctccaaagctgactggtaaatccacatcagatgttgtctgtcctgagaactcaagagagaaggattttcaagcctcccgatagtctgataaaaatcaaaaacaggagctaactcctgccaatctgattggctagttgtcaaggctagaaaaagggctttgcgagctgatacttcttggttagccttgagagttactttcccctccaagttttttagaaatcgggaaactccagaaagcaaatttttctctaactgcgagaaataaaaacctttcgttcccagacataagtctttcatgtcgctttctctagcaaataagagctcaaacatttgatagtaaaagaaaaatatctggcactgggtcgcgctcatcttttccttatcggcttctttttttaaccagagcaagggcgacaggtagctggattgagacatttcctctacctcctactcttttttaactggagcatctgcactagctgccacttcttttgactggatactttcccactggttaatctcctctgagataagaccttcgcatgtcttgacaaatagggcaaaagccttggtctttcctgcatatttctccgtttggcattgatagaggaatttttctttctccaggagttgcgcagttttttggtaagaaatccaattttcctttgcattatacaaattgataatcccctcacacagcaagccgagactggataaggcaaccgaaatcaaacggtagcgatcacctggcataggaatagcacaaaagacagctatgaggaaacctgccacgatttctgttatttttaataccttatagcgcctacgatgttgaacgcttttctttaaaaaatgagctatctgtacgtctaatcgctctgtcaggtacatttcttctggcgtcatattcgtaactcctttcatttactttgataatcatagtataacatatttgaatatcaaagtatagtaaaaactggactataacttattagacttcctgcgaaacaaaatatggtatagtagttctatgaattatgaagcaagtaaacaactaactgatgcacgatttaagcgtcttgttggtgttcagcgcacgacttttgaagagatattagctgtattaaaaacagcttatcaacttaaacacgcaaaaggtggacgaaaacctaaattaaacctagaagaccttcttatggccactcttcaatatgtgcgagaataccgcacttatgaagaaattgcggctgattttggtattcacgaaagcaacttaatccgtcggagccaatgggttgaagtaactcttgttcaaagtggtgttacgatttcaagaactcctcttagttctgaggacacggtaatgattgatgcgacggaagtaaaaatcaatcgccctaaaaaaagaattagcgaatgattctggtaaaaagaaatttcacgctatgaaggctcaagcgattgtcacaagtcaagggagaattgtttctttggatatcactgtgaactattgtcatgatatgaagttgttcaaaatgagttgcagaaatatcggacaagctggtaaaatcttggctgacagtggttatcaagggctcatgaagatatgtcctcaagcacaaactccacgtaaatccagcaaactcaagccgctaacagctgaagataaagcctataaccatgcgctatctaaggagagaagcaaggttgagaacatctttgccaaagtagaaacgtttaaaatgttttcaacaacctatcgaaatcatcgtaaacgctttggattacgaatgaatttgattgctggtattatcaatcatgaactaggattctagttttgcaggaagtctattatatatgcacagacatatgaaatctttttgagatagcagttatgatatatttatccattcacaacatcttctgtaccaatactacaatattggtacattttgattacacaatcgtttcaaaaaatatgatggaagcctgagtattttatagtaactcccttcctatcaactagatcaaccagttgagtgttgaatgttgaaacaccctagcctcagcaaaggactatgagcagcatttcctagctaataggacgctccaaatcacctattctaaatccatcactagcttggtcagtaagatacagactgcaaggcaagactgacgtggttgatgagattttggaagagtattacaatcatagattcaccagtagacttgaccgcagatttaactatagtagattgaaactagaatagtacacttctgcttctaaaacattgttagaaatcgatttgactgtcctgatcaatttgtcctgttctcgtttcattctactatactaaaaaaccacctgaaacaaatcaagtgactagaggataaaaacgaagactgggcaaaaagttttgaaaagcaaaaaacgcataatatcaggtcttgaaaaaccttgatactatacgtttgattgtgggaagattgacttcattttctcctgaaattgaagttttttctagtttccagatatagacgaattcaatatagccatctcgctacaattattttaaccatcgagaaaatttttcagaatttcaaaaatttcattttgatccaatgaaatgtcattattttgaagaatagttgacttcacaggctctaattctatcacaaagcggtgcatgtctgcttttaccgcactacttgatgttatagccgataacttttcatctcctagcaaggaagctgtcaaacgggtaaggtcattcaaatgctttttaatggacttacttaaaccttgagcacctgtggcagagcgctccctcatatccagccaagctttagccttaaaaataattaatactcaatgaaaatcaaagagcaaactaggaagctagctgcaggctgctcaaaacactgttttgaggttgtagatggaagctgacgtggtttgaagagattttcgaagagtataaaccacaattactcaataccgaatacccctgaatggtttctttttcatgcaccaatatattataataatcttcatccaataataaggctgataaactagcatcttggtcaaaatgtaagggaatttctcgaccgtccttctttaatggatattctggtaagatactaaatagttcaatcatagaaggaaactcaggattagttgttgtaaatcgaaaaagctgcgctttctcatctttctgacttccttgatactctcccaattctaaaaaatgattcaaggtagtataaaattccttattttttacttcatcaatgatgaccatatcataatcttttgttgtgcgacttttaaatccttgcgaatccaatacgatagaggtagcagttcccccaatcagaacataatagttctgaaaatccgcaaacatttcttgaaaaataactttcgtattagctggcatcatcttctcccagatactgtaatatcatattttctagtgcttcactctcttcctctatacgtgggtcatcatcatcttttaaggtcaaataaagagaaatcggatctacaaattgtttatcatgattatttttaaaatcattccaaaactcagatacaaaaggacgatatttccatatctctagcatctttcattttaaaacatgctgagaaagtggcaaggataactgattgaattttctctgccatatgacatagctaatattttcatccgtttcagctaaaaaagttgaatgcgacaaagcataagcaccaccatatagaaggttagaaacagattttatctgctttatatcgccatctggcaataaaatccgttttttgatgggattaaataaacatgacacggattttaagaataattctttctttgacaccgtatatgtgtaaagcttattttgcttgtttaaccaatataaagctttaaaagtcctcaaacacctataaattgttgagtttggaagtccagtgacttgtgaaagcaaatcaacatctactactttttgaccttttgtcaataaaaaggcaatccacgttaattgttcgctaggtgttaattccttagggacttcagtatcattcgcattgagtactagtcccaatggagggaagaagaggtttcccttaaagtctacaaacggaactctagcttgaagtaattgctttttttcactgtctgataacttcgaaaacaccaaaacaacatccatattggctttttcacccatagtgcgagcctgagtaacaaatgaactcaaactcccccttctcttttctttaatcaataaaaatgattccttatgaaaagtcatttgagtatactcaaacctttttacaaaactgattggtaaagtcaaagtcagttcctcaatactgacatcaacataaaaggattgaaaaattgacattatctttttgacattcatgttttttccttattctatcatttttattatattttatcattcggtataataaaatataagttttttgataaaataaccaaaaactactcgctatcccctctcacattaccctacatatcgtttgacatgcgactgatagttcaggaaaacttcaaggagaacttttctctcatccactatgcaggacttactatttcacttctactcctataggctcaatttgacacttttctttttcgaattgctcatatgcctcctgaatagtgagttcgatttatccaaatttatttttgtctattttgatgaatacttccacgaagatagtctgaaaatgaatttgcaccaattttccttctctttttaagcatattattccagatatgattgccctcttattcagtaataaattacgctttaaacgcttcaatcagtatatctcctgttgtcatatattctaaagaaaattcttctacatatgatttaacatctcttaggttattacttcctaatatcccattatgctttttcgctaaggaaatagatgccccttctcccttaccaataatcttgttactatcatgatttcttgttaaatctctatataatgcgtattcttcagttccaatgtctatgctcacaatctcagctgaacccttagctaccaactgatctatcctagattttaaatggggaattgtaggtatattgatttcatcatacacctcttgtggaataacaattttacccaaatagagcttttctaaaagatgttcagtgccaacccataaaaatactgaaatacaatctgcatcaataaatacacgactagtcaaacgacaactcccccctcttcatctagcccatatacaatatcatatctgaaagcatctagtaacagttcctcatacttcccttgcgaaattctgttattttctaaaagttgttcagttgaattaatatattatcctaatgccatttcttttttactttctgacaaaggacgatataaacttgtatcatagcctaatcttgaagctgtctctataacactaatatccatatttttaatttcttctgcatcaaggtatccatcattcctcaatctatataacatagctttatgactgataccataaaactgacccaattttataatatcttctacttcaagatgagttctattggcattttctctgatttcctcaaccatcctatacagtgaagatgggaaaattaaaaaataagaagcaaactgatccgcttttctttcagtttcatctccttcaccaatcaagataagactgactgaactcttcttcacctcatcataataaagatgatacagtccatgtgctaaagaaaatctttaccttcctaatggcatgtctgaattgactgcaatgagactgaactgagttcctttataacagactccgctaatattctttccgagtccataaaataccagcgtcaaattttctatcttttgtaccaatttaaaaatatctatcggcgattcaccatcagctcccaacttttttctaagatttgaagctttattacttaaatccattcgtgatattcctttcacctttttccattttggcaatcatgctttgattcaaagacaaatactcagcaatcttatcttgagtaagatttgaagatattctaagttcttttattctttttccaacatcacatacatttatcacatacatttatcatattcatacacctctcataaaaagaatagcacactcttgtcataattttttaaataaaaaaattatgacaaaacaaggaagcaatttattgatgctgcttaaaaatctaaaattgatgagttcctatcaaaaatcgtatcttcaacctcaaaacagtacttaaagctatccgactcggtttacattgtcaaatttagattttatttgagcataactttctagtttgctttttgatttttgtttaatatagtagcaaaattgaaggaaatatctccacaagaaaacgcatactattaagctttttcaagacctaataatatgcgctgttctgatttgaaagacattccattattattttactgtaatcaagccatctggctctactgtgaattctggcttgtctgccagtgttccgtctggtttgaggtagtaccagcctgttccgtccgctgactggataaaggcatttgataccatggcgccttctttagcgtctaagtagtaccaagtgtccttgtacttgacccagcctgtcttcatggcaccttcttcgttgaaatagtaccacttatcagcgattttcttccagcctgtagccatttcgcctgagttgtcgaaccagtaccagttgccgtctgtgtgcttcctccagcggtctgcaagcatatagcctgaactgtcaaagtagtaccaagtgccattgattttctcaaacttgtcttttggataagagccgtctgaatgtacgtaccagtagccagtgtcattcttctgccagcctgtttcaatcgtcaagccgttctcaatatcatgcttaaactgctcacggctaatgccccatttagcaagatatggataagggtcaacgtggtctgagtggttgtttggttggttattcgtgcaatactcgtgcgttttaattccagctaaactccctgtatcaagcgttttcggcaaacctgcttcatctgctagattgcgtaagagttcgatataaaggcggtagtccgtcatgaactcttctttggttgaatggctttcaatcagttcaaccgctgcataggtctcagcattccaaccgcccccaacgtcccaggcaccattatcaacaggtcctacctgcatgatgcaaccgttcccaacaatgtgcgagaaaaaacctaattctgggtctttccgccagtgataatccgcttcattctgtacggttgaatgcggattcccagttgagtgtgcgtgtacttgcctatatggttgcacgccgacttgaggcaaatctgttcttaatttactcacattaatttccatattctactccttatcaattaaaacaactcattttttacaatccagaaccagaaactcctttatttctaccttacaaagaagacaatcttagtcacgattaggcttgtagatagaacttcaaaacgcactattttgacactgtaaataggactgacaaggtctgcattctatctacaataacaccccagactaaaaagattttcaaaagtatatttttacagtctctatatgtccttttcataaatactatactttattatatcatataaaagaagtcaaaagtctgttaaactattttcaacaccaaactaaagaagagaacacaagttttttcgattttcactagaggaaatggattttattcagtaaatccaactaggattgcactttggttgccaagattgccttgccttcttttatcaagggatgacggaataatgagaagtacagttgaactgtcatggcaacccagataagaggttcacaaaggataacacccttatatcctgcccaaggaataatcaaaaccacaaaaacgatttttccgattagttcaataaagctagaaactagaggaaggatcttttgccccaagccctgcaagcaattgcgataaatcaacaagaggctcaaaatgggataaaaggttgaactgatttgcagatagagacttccattttctatcaagtaaccatctgtcgaactagccaagaaggaaaccaaagctggactggcaaaaaagaggaaaatacaaacaaaaactgcccaggatatacttaaacgactgccgattcgaagaccttgaacaatacggtcaggtcgcttagctcctagattctgagaagcaaaggtcgtcattgatgcagaaatagcggtcataggaagaagggcaaaggtcataatgcgtcgagctgccgtctgggcactaataatcactgcaccaaatgtattaacagaaaactgtaaaatcacactgccgatagatacaattgaactcatcaagcccatagccaaaccttgctccaagagatccgcgtacaagcttttgtcccatttgaaatgtttaaactgtggcaagagttctggcacacttttacgaatataataaaagcagagaaccgctgataaaccttgcgaaataatggtagcaagtcctgcggattgaactcccagatgcaattgcgtaataaaatagagatccagaaccacattaaccaaggcagagaaaatcagaaatcccagggctgctagactgtcaccaatagaccgcaacaagcctgcaaaaagattataagcaaagctgacacctacacaggtcacaatcatagaaatatattgataagattgaggaagaatttctgcaggagtatctaagtattgcaagagaggatacaagccaagaaagcccagcaacataactagaatgctcaaaagagcacctaaaatccaggtggctgctactgcttccttgattttagtgaaattccgagccccataataacgagcaatgacaatccccatgccattgccaacaccaagtgtaaaacctacaatcaggtcaaaaatcgctgtcgtcgctcctactgcagccaaggattcttgaccaagaaatcgtccaacaatcaagacatcagcagtgttatagagctgttgaaaaatatttgatagcaaaattggaaaggtgaagcttaagagcgagggaagaatcggaccatgtatcaggtccactgttcgttttttattcataaagctattatatcagctttccagaggagcgacaagaaacagcaaactatatatagcggaatgaaataaggaaagtcaaatcgatttttaacaatgttttagaagtagatatgtactattctagtttcgatctattatagttggttgagtttggaatagtacgctgtagctgctaaaacatttctagaaattaatttgactttcctaatagagttgttcatatcttatttcaagctactatatataatctaaaaacttgaatcaaaaatcgaaaaagtagcggatttctccactgctttaacagcttattcttcaatttcgatttcaagttcatcgcctaagtcaagcggaacttcttcattcactgcttcttctttctttggctcatcttttttgttttcagtatcttgttctgaaacttcttctccatcaatcaagccaaatttagaacggacttgcttatcaatttcatcaaagatttctgggtgctctgccaagtatttcttagcattctcagaaccttgcccaattttttcatctttgtaagaataccaagcccctgcttttttgataatatccaaatcgcttgcaatcttcaaaagctcaccagtcttagaaattccttctccgtacataatttcaactacggcttccttaaacggtggagctaccttattttttacaaccttaatcttagtttctttaccgacattggtttctttttggtcaccagttcccttaatttgtgtattaccacgaacatccaagcggactgaagcatagaatttcaaagcacgtccgcccggtgttgtttctggatttccaaacatcactccaactttttcacgcaattggttgataaaaatggcaattgttttggttttattgatagaggcgccaagtttacgcatggcctggctcatcatacgagcctgcaaaccaacatggctatctccgatatctccatcaatttccgcacgaggaacaagggcagcaactgagtcgactacgacaagatcaactgcacctgagtcaatcaattttcccgcaatctcaagaccttgctctcctgagtctggttgagacaagagcaattcgtcaatattgacaccaagggccgcagcataagctggatcaagggcatgttccgcatcgataaaggcagcaatcccaccttctttttgcgcttgtgcaactgcatgaagggcaaccgttgtcttaccagatgactctgggccatagatttcgatgatacgtcccttaggataaccacctgagccaagggcaatgtcaagagctaaagaacctgagctcatcacttgcaccttttgctccgcacgttcacccaaacgcatgattgatcctttaccaaagtctttctcaatcaatttaagagcgtcattcaaggccttttcacgttctgccccaaatttttttgaaatttcttctaatttttttggttttttcgccattctattctcctacattctaatgatcctcagacctatctactattatatcaaaagttagtcacttaataaagccttgcgaactaggttaaaggcatgcataaccgcaatgtgacgtacatctgctcggcttctgcctccaatattaaccttgataacctcagttccttgatcttgcgccaagcctatgaagactgtcccaactgggtgtccttctaggctatctggtcctgccactccagtcaaactaattccaaaatcagactgggtcttgcttcgtgcctgctcagccatcttctgagctgtaaattcagacaccacaccatgttcttccaaattcttggcaggaatatccaacatccttgatttttcctccaagctataggtcacaaaaccacccttaaatatacttgaaactccagaaaaattcgccacggtagcttggaaaagacctgccgtcaaactctctgcagccgcgatggttttcccttgccttttcagttcttctaccacaatgctggctaaactagtttcttccccataaccatagcaaaagtctcgtaaagaaattccttcgaaagtctggcagtccaagatttgattttccaagatatccagcgcttgattcgcctcttcttgactgctagcctttgttgacagacgtagagtgacttctcctgtcttggcataaggggccaaggtaggatcgatctgattatcaattaaatcagccaaaatcgtaaccaactggctctcgccaatcccaaagaaacgaagaactcgggaatacagcttgctccctgtcatcaacttgggtagaagttggtttaagaccatgggtttcaattcacttggcggacctggaaggacgacataggtcactccgtctacttctaattttcctccaacagccagtcctgtttcgtttggcagtggaatcgctccttctacaatttgagcttgtctttcgttattcggtgttcgggcatagtctggtcgcagggtaaaaaagatatccaacttctcctgagcctgaggatcaaagactaatgctttccctaaaaatttagctagggtttgtttggttaggtcgtcctcagttggccccaaaccgcctgtcaaaatcaccagactgctacgttgactggcaatctcaagcaaagacaagagacgaacttcattgtctcctacagccgtctgaaaatatacatctaccccaatctcagctagtttttccgacaaaaactgggcattggtgttgacaatctgccctgtcaaaatctctgttccaacagcaatgatttctgctttcatgtttcctcctacctatctattcgtatttttttgaaaaaatcgcaggaattttcctacgattgatttttttatttgtatcaaaagttaattatcttcatcaccaacaggtgctctgccaaataaatcttcaaataaaaccgcattggtttcaagctgagtaacttcttcttgtcccaaagaacgtcggagtagattttgcatttccaacatatgtgctctcgaaacaatctggtaagaaacaccttgaagtatctctccttcaccctgcaactgctgagtttcaatggttttaaatgaatctttatagcctagcaagttagggatactttttgcagacaaatcaatattggtctgcatattgtcactcaaagcttttagaatctcttgataatgaccaatgctatttaaactgagagctttttccatgactttttgaataacttcacgttgacgtttttgacgaccataatccccctcaggatcttggtaacgcattcgtgcatagactagggcttcttctcccccaatatgttgctccccaacaccgatagaaatagtattaaattcttcttggtcactgatagaaattgggaaacctaggatattattgactgtaatacctcctactgcatccactagtttttgcaatcctctcatattgaccatcacatagcgatcaatatggatattcatcattttttgaatggtttctatagcaagctctgctccaccatctgcatatgctgagttcagtttcgcttcatgagcctgaccattccctgattcaatgcgcgtcagaatatcccgctctaaactcatcattgttgtttttttcgttttaggattcactgtcatcaagatcatgctatcacttctaccgacccaagtttcagttcgttcaacatttccggtgtccactcccattaacagaatggttagaggttcagtcgcttcaataaccttggtttcttcaccgatttttttataggttttagctaaggtttctgtcccttgttgataaatagtataagcaaaaacacctactcctactacagttacagaaagtaaagctagcaccattccaataatttttttaaccatatttctactaacctatcagtttacccatcaagtaaacatcgataaatttcccttcttctatatatgccccacgctcttggctaccttcaatgacaaagccatgcttttgataaagatggactgctgcttgattacgagtttggacagtcagttggagacgacgcagaatgccacttgcttgtgcccactctatcgcttcttctagcaacaaacttcccaagccattattccaatatctttttccaatcacaatgaagagatctccaatatgacggactctcttacgctgatcagctgtaatatttacaataccagcaattttgccatttaagaatgcaagtaaggttatctgattgtccgaactagcttgcttgttgaggaatatttccatctcctcactagtcaagagaataccatctccgtctaggctggtaaagtctgtctccaaactcacacgatttaaaaaggccactaattcagctgcatctttgggctctgcttccctaatgagcaattcatactccatattgaagctcctctaacaatttctcagcacgcaaaccctttgcctgaaaatttaaacggcgtccatctgcttcttttagaatttccaattctaaataagcatctggcaaggcatctcctaagagatttccccactcaataacagtcacgccgccaccaaagataaactcatccaagtcgatagaatcagcatctccttcaatacgataaacatctaggtgataaagtggaagtcgaccttcatactctctcacgatagtataggtgggacttttaatcatttgagaaatctgtaatccttttgcaagtcctttagtaaaggtcgttttacctgcacccagttctccagttaagattaaaacatcattctttgctaatagatggcccaaacgctcccctaaggcttgcaactcttcttcattttttgtgtacatactcttattataccaaaaacttttcttttgtgtctattttcctactaaacttatcatcataacatccataaaaaacaggctttctctaaaagaaaatgagcgtaacaatgaccaatacaagatctcggaaaatatgaccataaaaggaaacttccttcttaaccgaatttgggacaagataggctgcaaaaaacaagcccagtccaatataaatcagaagtgagacaatggtcattggatttcttaagaaaagaagtgttgctaaaatagtcaccaacactgtcttttttctgtccagcatagcaagaaaatcgcgcacgtattttttcaagggtaaaaaaatcagcaaatctagcccaaataggaaaaagaaggatggcaataaaaagtcaactaattcttgctgcagcgtatttttgatgaacaagttatctgacaaaacaagaacagctcctaacaaattaattaagagtaacatactgtaaaaaagcttcaccgacttcttactggctaggacactatggacttcttgcttacgggtataaagataatttactccagcacagattcctgaaacgaaaaccatgcttccgatgaaaaaagctgtactttgtttaaaggacaagatgcattccttccataggaaacagctactcaaactgatttgaattaaagctaacaaaaataagattctcattgatttcatcttctctctcccttcctaccaatcattatactaggagaaaagagagaactgtttctaatcttctcaaatgtctctttaagacgctaaacaaacactagagactaatactcaatgaaaatcaaagatcaaactaggtagctagccacaggttgctcaaaacagtgttttgagattgcagatagagctgacgtgatttgaagagattttcgaagaatataaatttgaaatcatgaaaatccgtcaaacgggtggttgttttgtctcgcacctcacggagcgagacggactcagagtcacataattataaggctgatagtattaatctaactatcagccttacaggttatttaacgtttcagaaaaactataatgtcaagattaactaaacagtatctagttccttcaaataattttctatcttcatcaacattaaaggattgttataaatcttacataactctcttgcttctatataataatttttgacttgttctctgtctagaaatttggctccagcatttcctacaagaataagtagaggagccaattggtagcttgtctgtctttgtttacagagttcaatcgtttcaagagcttcttggatggcttcattatatttttcctttgatactaggtagtgagcgtagttgtaacgaactctgatgtagccaaataaaaactcttgatggtccaaattttttgtctgatacaactctattaaatgagagtagtttgcctcatattcttgttcacgacccactaaggaatagaaattagatagagtattcaacgcctttaaataaatcagagtatttgaagagacttttaataatatattttccaatgacgaaattgcctcacacttactgtcatattgatagaagtcaattatagatttaatccattcaaggtaagttcggtcttctaatgttagaaaagtgcttcgttctacttctattttataaagatattctaaatcgtcataatttctgtcatctaataggcgagcagatagatgtttgaaattagagaggttagacttaacttcgatttgttcattgaaaaagtaatccaaagggacttcaagtcgttgagagagtttgaataacaagtctgcggagggaataaaatgacctctttcaattttactaatctggctttgttcacaaattccttctgcaagagtttgttgggagagtctcaactcttttcttttcaatctgaatttctctgcgagtgtattcattaaagataataaaccttcctatttgcttaatttcattataaagtttttagttcaaaatagcaagttaaaggaataaataattctttatggtaataaacaaaaaaaaaagttaaaaattacataaaaatacttgactaaataaaatatatctgttagaataaaaacaaggaaaaagaaaggggtttcattgcatgagaaaaaaacgtggaattaaaaaattagttacatttgcattgctaggtgtttttatgtttagtaatacaattccttaccaacagtttattcagaagaataaacaattggagattcgagtgcaatcgcaaaagaagtccaatggtcttgatgttgggaaggcggattaaaacccgatattttgcacgagaatgagagaattataatttatctgaaaaaacgaaaaatatagagcaacttatttaactttttataaggaggagttattacttatgaccaactttaattcaaacgaaaaattttgtggaaaaagtttaaaatcattgtctgctgatgaaatgagtttaatttatggtgcatctgatggtgcagagccacgttggacgcctactcctattattttgaaatcagctgcagctagctcgaaagtatgcattagtgcagctgtttctggtattggggggctagttagctacaataatgattgtttggggtaaattaaaatgaaaaatgattttgtaatcggaaagagtttgaaagaattatctcttgaagaaatgcaattggtttatggtggcacagatggtgctgaccctagatcaacaattatatgttctgctacattaagttttattgcatcatatttggggtcagctcagactcgttgtggcaaagacaacaagaaaaaataaaatattcaattttaaaaataaaagttgctctttattttcctctctcgtaactaataattttgagagaggtttttttttaaaacaatagtaagtcgtataggtttgaggtaagtaaatgaaatataaaattaaaaatgtgcataaaacattgtttattaaggaaagatatcaaatattatctgaacgaaatgataattccttaaataacttttcattaaataattggcgttctacaatgtcaattatttctgaaaaaacttttgaagaaatgttgaaattaaataattacaataaaaaaatattttctaacactgtgaactatgattataccgaggaacagataagactatattcagaatatgccaaaaattcggaatggtataaatttgcggagggttcatttgaaatatttagaaaacatccccaaagaattaattttaagaaagatttttctagaattttggaaccctttattattaatttgcttaaattaatcaataattatctagagaataaagaatacgagtggattgacaagaatggaaatattttttcctctctagtattttatttagaagatttaatctatccttggattgttaaacctttggttttagagataaattcattgcgtgaaaaaggtttacttgaaggggaatcggagcagcaacggtacaaatattttataacattgtttgacaaggaagagaatatattaaatttttataacaaatatcccgttttactgaggcaaatatcggagtcttgtcttcggttctatacttattttatagaaattttatcaaatttagaaaatgattttagtgtgctagaagaagaattagggctaagggggaaattaaatgatataaaatttggaaagggtgatacacacagccaaggaaaaactgttttgatactcttctttgatgacgcgaaaattgtttacaagcctaaaaatttaataatcaataactcactaaatactattgctgagtatatccgaaaggttgatgaaaaaattaggataagaatacctcgaactattgcttattcggatcacagctatgaagaatttattgattatctacctctagagcaaaagaaaaatttacctgaatattattataattttggtgtgcttttagcatttatatatttatttaatgggagtgatatacattttgaaaatttaatttcctatggagatatgcctgtaataatagactttgaaacaatgttacagcaacctctatttgatgataaaactggtcagagtttgctggataccctgtttcacagggtgactcgaactttgcttcttccaacagagggagtaaaaagggaggatggtcttgatgttgagatgagtgctcttacaggaaattttaagaaggatgcttttaatggtcaagttttaattaatttaaatactgataaggtaaagtttgatattgggaaaattgattttgaaggtgggaaaaacctgcctgttcgggatggtgatatagaatttgataagtatataaaagatttcaaaaaaggttttagggatttttatctgatatttgaagagttaaataaaacagaagaatttaaaatgctattaaaagcaaacttgtatggtttaaagacaagggtactttttagagacacaaatagctatgcttcagtactatcttttttatatcatcctgatttttatgaagaaatgttagatagagaaaaagcattggaaaatctctggagcaataagttttctaatcaaggtattgtagcaagcgaatgtgaacaaatgaggttattagatattccgattttttatacagatacaaatatcaatgaaatctacgatgattttggaaatcattttatttccctacatcaattttctggatatgactattttatgaaatatttacctaataataatttggaaaatttagaaaagcaacttgatatcattgaaatttattttccaagctttgatcagcgaaaaaaaggatataaattaaacttatctaatagaaaaaaactcccaaatgaaagtttagttactattctgcataatgaagtagaaaatattgcagactctttggttattaataatatttatgacgaatatccaatttggagtatacctgttaattttaaaggttctaaatggtgtcttgaacaaacgggtaatgatatgtataggggtagagctggaatattactgtttatgtactatgtaaaattattgaaagataaatcatcatatactcaactgtacaataaaatgttatctgcaattccgccatctgtttctttatctaagaccacatttggtttaactggggatataggatatttcattgttctatccattatagaggattacgatacaaatactctcgcatgcttaaattatataaagagtgttttaactgagcttgaaaagactgattttgcaagtgtttcaaacaagtctgactatattaatggtcttctacctttaattaatacactggtaagatattataggagaggaatagagaaggaacgtgttctaaggctagtattaagtttaggtgatacgctatataatgatgtaagcgagagagataatagtaattttggatatagttttggccatggactatcaggtgtaatttttacattaaaaaatatttataaagtgacaagacttaaaaaatataaagaattaattttacaactagttcctagggagaaaatcaaaattcattctttgaagtggtgtagtggagaatttgggacattagttaatcatccccaaagtgttccagagggaattgtagctagtttagataatgatacattttgccatggaagtatggccataataaatttttacatcgactacatgaaagaaatggatactagtatggaattggagtctttattgtgtagtgttgtaatgaataaatcaaaagaaggagagtatcgtatcgtccaaacaagcaatttcccagatttttctttgtatacaggtgtgactggtattgcttatacttttttaaggtatatcgcactgaatcagaatgacaaaaagatagttatcccctcattacttgaaatctagcttaatttatagttttgtttctaaaatagaggtgtccactcattaagcaatataaaaataccaagattgactagtttaatatgtaattctataaaatatttttaatagtgtagcttttcgttgagataataatataataaagaaaagttctattctaattgctaaacggcttgaggtatatgctactgttatagaaatgattttaaactaaaatcaaaattactccaaaaatagtattgattttggtttaatacaaaacatatgtaataatgtgagtcaacaaaagtctgtttttgtaccatactatcttgaaaaatctactaaattcaaattgagaggatgaattaaaatgaataaaatatttatatatgcaggagtgcgaaatcataactctaagactttagagtatactaagagactttcaagtatcatttctagtagaaataatgttgatatatctttcaggacacctttcaattcagagctagaaatatctaattctgattcagaagagttgtttaagaaaggaattgataggcaaagtaatgctgatgatggaggtgttataaaaaaagagttattagagtctgatattataattatctcttctcctgtatatttacaaaacgtatctgtggacacaaaaaactttattgaaaggattggggggtggagccatctttttcgattagctggaaagtttgttgtaacattagatgttgctgagagtaacggctctgataatgtgtcagaatatcttagagatatattttcatatatgggaggacagatattacaccaagtttcaattaccaattcactcaaagatattgcagaggctcagttgatggaggcaacttataaaattgaagatgtacttgaagggaaaattaagtacaaaacaacggattatcaagaaagagcttaccagacattaaaattaattttagaaaattatgattccgaacattttgagaagatgtattgggagaaaaaacgcctttttgaagctaatagtttagaggaatggtattatgttgaaaatattaaataactctgtcatatatttatgtttgattccgttattgttcctattattgataatttttccaaatgattcattaatctattattttcgattgattttaatttcgttaatatcaattacattacatgaactaggtcattttttagtgggaagatgtttatcttataaactagagatgcttgctactccctttttcttctatttcagaaaaaaaatatatttcaaatttccagtgttattagcattcggttattgtcaaatgagtaatagaaacattactaatgaaaaaaatagtgataggaatttggtgttctacttctttgggggaggtggagctaacctaattgtcgcaatattagcacttttgggatttgtgccgtacgcatcagaattttttattttgaatataattctttttctagttacggtatgtttaccaattgatggaacagatggcaatgctattagagagatagttttgtattcaaaagattcaaaaacatatcagagattctttgcgaacagtctctataataatccttatataacaatcgacgattttgcaaaattaacctctaaagaaaaatcttttttttcaaaatttgaaaaatgtttgataaacctttactttgaagtgaaaggtgaagggtcagcatttacaattgctaatcatgaagtttttgattcaaatattcaggaaaatattatccatgagtactataaattactacataaatcttctgattggattattccacagaacttatctttagaagaagttgtttttaccttgtcaaactatatttactcgaaaaataataaatatttagaaaagattaagtatctaaagaaattagtagattttagacaagaagaaattatcgactttattttgaacaaggaggaagtattgtgaaaattccaatgatatatcaaatggaaaattcagaatgtggattagcatgctgtgccatgatattgaactattttaaatatgagatttctttaaatgaactacgtgaaatctacccatcatccagatctggatattctctcctatctataagtaaagttttaggagattttaatataagttctcatgcttttaaagcttcggtaagagatttaaaaccgctcagtttcccactcatttgcttctgggagagttctcattttattattcttgaaaaaattagtaaaaacaagttttatattttagatcctgcaaaaggcaggcagagaatgtcaataagtgaatttgaaaggcattattcaaatatcattttaacatttaaaaagttagatagctttatgtctcgtaaagataataagaagtcgcctgttttaaagtatttttttaagtataggaataagctagggattttattttttgtaacagcattattgtatgtaatacaatcattagtacctatagctaatagatacataattgacacgaatttcaaggacgattcgtattcgtctagaatgttatttactatattatttatatttactgtttcattctcactaatgtatttattaagacagatatatgttgcatccttaaaatatataatggataaagagattagctatgattttatgaaacatttgatatatttaccttacagtttttatgaaaaacgtactttaggggatatactttttagagctaactctattgtttatataagagaaatactatcaaataattttatagcagctatacttgatttgttaatgattgtggtttatgctgtggttttatttagcttttctaagtacatggtaatctttttaatatcactaagtctagctctatctattgtaatgtatccaatcataaaaatctcaaaaaatttaattgataaaaatataaaagaaaaggttaatgttcaaaatattacttccgaagtaatttctaaaaatagtgatattaagctaactggagaagaggaattttggattaacaaatgggataattttaatacaaaacagctcatcataggtcgaaaacttgatatacatttatcaattgttagtagtataacgaatgttttacaaattattctccctgttttgacccttattgtaggtgtaaatataaaaacattcgaacaattgacgttaggacaaattgtagcaataagtacagtctcaccatactttatttctcctataatttctttaagtgataactatatacaattaatgttattaaagggatattttttaagaatagaggatgtgtttaatactaaatccgaattaattccagaaagagtcagtcaagatataaaatttgataaaaaaatagaattaaaagatatttggtataaatatggattatttgatgattatgttttgaaaggaataaatgttactattaaaaaaggagaaactgttgctattgttggagaatcaggttcaggtaagagtacattagctaaaattttattaggtttattagaacctaatattggttcaatagaagttgatggagtagaaaaagaagaaattggtcaaacattgtatagaaagatttttggagcagtgttacaaaattcaaccctaagttatggtaccttaagagagaatttgacatttggacactttgtttcagatgaagaattaatgacaaatctaaattcaattggtcttagcaatgtagttaaatctttacctcttggattagagacaatcatcgctgaagaaggtaataacttttctggagggcagcagcaaatgatacttttagctcgttgtcttttgtcgaaaccttcggtagttgttttggacgaagcaacaagtagtttagataatttatctcaacaaattacaacttcttacttaagtgaaatcggtaccactaagattttaattgcccatcgactagatactatcaagtctgcagataagatcttagtaatgcataatggtgaaattgtagagattgggacccatagagaacttcttgaactaggaggcatttataagcaattgtattcaaataattagtttttgattaaaagggtaaatttatgaagattatgaaaaaaaaatattggactttagcgatattattcttttgtttgttcaataattctgttactgctcaagaaatacctaaaaatcttgatggcaatataactcacactcagactagcgaaagtttttctgaatctgatgaaaaacaggttgactattctaataaaaatcaagaagaagtagaccaaaataaatttcgtattcaaatcgataagacagaattatttgtaacaacagataaacatttagaaaaaaactgttgtaaattggaacttgaaccacaaataaataacgatattgttaactctgaaagtaataatttactaggcgaagataatttagataataaaattaaggaaaatgtttctcatctagataatagaggaggaaatatagagcatgacaaagataacttagaatcgtcgattgtaagaaaatatgaatgggatatagataaagttactggtggaggcgaaagttataaattatattctaaaagtaattctaaagtttcaattgctattttagattcaggagtcgatttacaaaatactggattactgaaaaatctttcaaatcactcaaaaaactatgtccccaataaaggatatttaggaaaagaggagggagaggaaggaataatatcagatattcaagatagattaggtcatggtacggctgttgtagctcaaattgtaggggatgacaatattaatggagtaaatcctcacgttaatattaacgtctatagaatatttggtaagtcgtcagctagtccagattggattgtaaaagcaatttttgatgctgtagatgatggcaatgatattatcaatcttagtactggacaatatttaatgattgatggagaatatgaggacggaacaaatgattttgaaacatttttgaagtataaaaaggctattgattacgcgaatcaaaaaggagtaattatagtagctgcattagggaatgactccctaaatgtatcaaatcagtcagatttattgaaacttattagttcacgcaaaaaagtaagaaaaccaggattagtagttgatgttccaagttatttctcatctacaatttcggtcggaggcatagatcgcttaggtaatttatcagattttagcaataaaggggattctgatgcaatatatgcgcctgcaggctcaacattatctctttcagaattaggacttaataactttattaatgcagaaaaatataaagaagattggattttttcggcaacactaggaggatatacgtatctttatggaaactcatttgctgctcctaaagtttctggtgcgattgcaatgattattgataaatacaaattaaaagatcagccctataattatatgtttgtaaaaaaattctggaagaaacattaccagtaaaaaatggtataaaagtgttaaatataccaaacgtattgagatatgatttgaatatgttacaattagaatataaaaatgaacaaagttgggatagtttcatagataatgttaatttaattgagttggaagagagaattcaaactactattggaattaaacaaataaacacacacaatattattactattgcccgagaagggtactctcaaaattatttacctaacacttcagaaaatacatataattcattacaagtcagtttagttggagtattactactttttataagtatggtaaatattttatgggctaaaaaaagtaaatgaaaataaaatttggagccctctgaaaaagtaagtcctacagttcaactaaaatgagtcaaaagatgaatcaccttgatgtaggggagtttgtcttattgctgcctgaacacctccgttcagaggaagaacattataaatctgtttttgaagacgacttaaccagtcgcatatctagtcaagatgaacgacagcaaatgactgctacggtaggttatttagaatcaggtcaggatcgttttgtgtataatacgacccctatttcttaccagcagtttttgaaagatccaatcatcattgttataacaccccaatcaactggtccacagtccattttgttttggatagacgcagtacagaactacgttctctttaatcaattgtctgatgcccaggagcttatccagagacaaggcattgaaaattgggtctcagaaatgcaaacaggttaccacaactacatcacattattggataatatccagagggaacgttgggtaatgctagcaggagctgtgcttgggattgcaacttcaatcttgttgtttaacactatgaataggctctactttgaagaatttagacgtgccatttttatcaaacgcattgcaggtctcaggttcttagaaatccatcgcacttatctctttgctcaactgggtgtgtttttactgggatttgttgcgagtgtatttcttcaggtagagataggagttgctttcttagtcttgttactctttactggtctatctcttttacagttacatgtccaaatgcagaaagaaaacaagatgtccatgcttgttttgaagggaggttaatatgattgaacttaaacaggtgagtaaatcttttggagaacgagagttattttcgaatctttcaatgacatttgaggctggaaaagtctatgccttaattggttcaagtggtagcggaaaaacaaccttgatgaacatgattgggaaattagaaccttatgatgggacgattttttaccgaggtaaagacttggccaattataaatcaagtgattttttccgtcacgaattgggctacctcttccagaactttggcttaattgaaaaccaaagtattgaagaaaaccttaagctaggtctcattggtcaaaagttgagtcggtcggaacagcggttgaggcagaagcaggctttagaacaggtcggcctggtttatcttgacctagataagcgcatctttgagttatcgggcggagaatcgcaacgggttgccttggcaaaaattatcttaaagaatccaccctttattctggcagatgagccaacagcttcaatagacccagcaacctctcagttgattatggagattttgctatctcttcgagatgataataggctaatcattatcgcaacacataatccggcaatttgggagatggctgatgaagtgttcacgatggatcatctgaaataaaaatccttgtttttaattgcacgatgagttactgaaatattatcatgaatcaagaattggagttaatttagaattgtacttaatttagaattgtactttattaatattgaggtaactttttcttgataaaggaagaaataatggagaggaagttagaatgaaaaaattcgacaattatattattgagaagccttgcgattctaattcagataaactgcaaaaaatcttaataattgaaagtttggtagatgatattttgcaattttctctcagaatcaataatagtgtaggagagattttcctcctacaaccgttttaaaagaaaactatctttattccatgttattttgaggaagatattgtgaaagtcaaagatgatgataaagttgagtggaatttgttagaatttcaaaaatttagagcatttttggcttagtaatctgtgttgaaggctcaaaacctatggtaaaaaagtagctttgaaaacgtattgcctccaaagatttagttaaataatgatttaacacaaaaagaaattattgaagttctggaaagatgttgtttcagtattgagaaaaggtgggaaaaacttgcgattttcacagagaaaggaagaaaaagtatagaaatatagtcaattgaaacaagaacaggataaaagaaccttttgtgccatatttttctcctttcgctttacaattggattgaacacctttattgtatcgcgtttggagtttttttggtataaccttcgacgcacacccgcatagcgggtgttttttttgtctcgcacctaacggagcgagacaaactaatagtcacttaatcaaaaaacgcaccatatcaaaaactaaaaagtttgatatcatgcgtcatgtcttaaactaattgactatactttctattcaaatgagcttttaaccaattgattgagccaatccactcttaaaaccaaagagcaatttctcgcttagctgactcttctgaatctgaaccatgtacaacattttggataatctcattttctccagcagcttttgcaaaatcacctcgaatagtgcctggtaaagcttcttctggacgagttgcacccatcatggtccgccaagtttcgattactttgggaccagaaatgacacccacaagaactggacctgaagtcatgaattcacgaatcggtgggtaaaaactctgaccaaccaagtcctgatagtgctggtcaatcaactcttctgaaacctgtgaacgaaactccaatttttcgattgtaaatccacgttgttcgatgcgctttaacacttcacccactagccctctttttacaccatctggtttgatgataaagaatgtttgttccatacccgtctcctttgtcagcttctttcttttattttaccacatttcgtggaaaaatggagaaagttttcagaagagagaatgagagaaccctcgggttctctcattctctcttattctactgtttcttccacagtttcaacggcagtatccacaactacttctgttgtttcttcatttccttcttcctctactggaggattaaggtattcttcttcgttgacagcatgtggttcaaggttacggtaacgggccataccagtaccagctgggatgatcttaccgatgataacattttctttaagtccaaggagatggtctttcttaccacggatagctgcgtcagtaaggacacgagttgtttcctggaaggaagccgctgacaagaaactgtttgtttcaagtgaggctttggtaattcccataaggactgggcgacctgtcgctggaactccacctgcgataaggacatctttgttggcatctgtaaagtcattgatatccatgagggtacccatgagaagatctgtatcacctggatccatgacacggactttacggatcatttgacgaaccattacctcgatgtgtttgtcaccgatttctaccccttggctacggtaaactttttgtacttcaccgagaaggtacgtttcaactgacaagacatcacgaactgcaaggagacgttttggttggatagaaccttctgtcagagcagcaccacgcgctacttggcccccaacttcgacacgcatacgagctgtaaatggaacgacatattcaccttcgccagtttcacccttaacaaagactttcttggtacgagttgatgcatcttcttcgatagcagtaacttgtcctttaacctctgtaataaccgcttcccctttaggattgcgggcttcaaagatttcttggacacgaggaagaccctgagtgatatcggtatttgaggcaaccccacctgtgtggaaggtacgcattgtaagctgtgtaccaggttccccgatagattgggcagcgattgtaccaactgcttcaccaacttcaaccgcatcaccagtcgccaagttgataccgtaacagtgacggcagacaccgtgacgagtgttacatgtaaatacagaacggatagtcacttcttccacaccagcattgacaatttcacgcgccttgtcttctgtaatcaattcatttggaccaataatcactgcaccagtttctggatgtttaacagttttcttagtgtaacgaccgttgagacgctcttcgagagactcgatcatctcttttccttctgcgatagaacggatcaagagaccacggtcagttccacagtcgtcctcacggatgataacgtcttgggcaacgtcgaccaaacgacgagtcaagtaacctgagtcggctgtcttaagggccgtatcggtcatacctttacgagcaccgtgagttgagaagaacatttccaataccgacaaaccttcgcggaagtttgaaaggattggcaattccatgatacgtccattcggagcagccatcagaccacgcataccggcaagctgtgagaagtttgagatgttaccacgggctccagagtccatcatcataacgattgggttcttaggatcttggttagcaatcaagcgtttctcaagtttttcacgggcagcacgccattcagctgtaacagcattgtaacgctcgtcgtctgtgatcataccacgacggaattgtttggtgatttgttcgacacgtttgtgtgattcttcaatgatttcagccttgtcatcaacgactgggatatcggcaatacccactgtcaatcctgcaagagttgagtggtggtaaccgaggttcttcatgcggtcaagtagggcagaagtttctgtcgtacggaaacgtttgaagatttcagcgatgatatttccaaggtttttcttcttgaatggagggttgagctcaagattgctgatagcttccttgatatctccaccaagtggcaagaagtatttagctggaacaccttctgtcaagttggcattgtttggttcttgcaagtatggtagcccctctggcatgatatcgttgaagagaattttaccaactgttgtaagcaagaccttatgtctttgctcttctgtccaaggcttgttgaggctgtctgttgcgataccaacacgtgagtggaggtgaacataaccattgcggtaagccataaccgcttcgtcacggtctttgaagaccattccttcaccttcgcgaccagcttcttccatggtcaagtagtagttacccaaaaccatgtcctgagatggagtaactaccggtttcccatctttcgggttcaagatgtgctcagcagctagcatgaggatacgagcttctgcttgtgcttcttctgaaagtggtacgtggatggccatttggtccccgtcaaagtcagcattgtaggcttcacagacaagtgggtgcaagcgaagagccttaccatcaatcaagactggctcgaaggcttggatacccaaacggtgaagggtcggtgcgcggttcaaaagcactgggtgttctttaatcacttcttcaaggatatcccagatacgctcatctccgcgttccaccaagcgtttagctgctttgacgttttgcacgatatcacgggcaacgatttcacgcatgacaaatggtttaaagagttcaatcgccatttcacgcggcacaccacattggtacatcttaagagttggaccaacggcgataactgaacgtcctgagaagtcaacacgtttaccgagcaagttttgacggaagcgtccttgtttacctttaagcatgtggctcaatgatttcaatggacggctacctggtcctgtgattggacgaccacgacgaccattgtcaatcaaagcgtcaactgcttcttgaagcatacgcttctcattttgaacgatgatacctggtgcatttaactcaagcaaacgagccaaacggttgttacggttgataacacggcggtaaaggtcattcaagtcagatgaggcaaaacggccaccatccaactgcaacattggacgaagatctggtgggataaccggaaggatgttaagaatcatccattcaggtttgtttccagacttgtaaaaggcatccaaaacatccaaacgacggatggctttgacacgcttttgtccagtagctgttttcaattcttctttgagttcagcaatttctttttcaagatctacttgcttcaaaaggtcttggatggcttccgcacccatcttggcaacaaatgaaccataaccatattcacgcaagcgctctcggtattcgcgctctgtcatgatagacttgtgctcaagtggtgtatccttaggatcaatcaccacataagccgcaaagtagataacttcctcgagggcacgagggctcatatcaagggtcaagcccatacggcttggaatccccttgaagtaccagatgtgagatacaggagctttcaattcgatatgtcccatacgctcacgacgaactttcgtacgcgttacttcaaccccacagcggtcacaaacaattcctctgtaacgaatgcgtttgtacttaccacaagcacattcccagtcttttgtaggaccaaagatcacttcatcaaagagtccttcacgttctggtttcaaggtacgataattgattgtttcaggttttttgacttctccataagaccatgaacggactttacttggagaagctagggtgatttgcatacttttaaaacgatttacatcaaccactatttcttccctttctattctaagtgaactgcttattcttgttcagcagcttcttctgttgcttccgcttttgttgctttctcagcttcttcagcttcaaaggctgctttagcctcttgggctgctttttcgcgggctttttcaaggtcatctacgtggatgacatcttcgtccattccttcatccaagtcgcgaagttccacttcttggtcatcttcgtctaggacacgcatgtcaagaccaagagattgcaattctttgacaagaactcggaaggattctggaacacctggttttggaattggtttgccttttgtaatagcttcataggctttcaaacgtccgttgatatcgtccgacttgtaagtcaagatttcttgaaggacatttgacgcaccgtaggcttcaagagcccaaacctccatctcaccgaaacgttgtccaccaaactgagccttacctccgagtggttgttgggtaacagttgagtatggtccgactgaacgcgcgtgcaatttatcatcaaccatgtggtggagtttgatcatgtacatgactccgacagaaacacggttatcaaacggttcaccagtacgtccatcgtaaaggatcgttttggcatcgctatccatacctgcttctttaacagttgaccaaagatcttcagaacttgctccatcaaagactggtgtagcgatgtgaataccaagagtacgagctgccataccaaggtgaagctccataacctgaccgatattcatacgtgatggtaccccaagtgggttcaacatgatgtcgactggagttccgtctggaaggtaaggcatgtcttctacaggaacgatacgagagacaacccctttgtttccgtgacgtccggccattttatctccgaccttaatcttacgtttttgagcgatgtaaacacgaaccaacatgttaacacctgattgcaactcatctccatttacacgtgtaaagatcttaacatcacgaacgacaccatcggcaccgtgtggtacacgaagagaagtatcacgcacttcacgagacttgtctccaaagatagcgtgcaagagacgttcttcagctgaaagatctttctcacccttaggtgttactttacctacaagaatatcaccttctttaacctcagcaccaatacggataatccccatttcgtcaaggtctttgagggcatcttcaccaacgtttggaatttcgcgagtgatttcttcaggcccaagctttgtatcgcgcgtttctgattcgtattcttcaaggtgaacagatgtgtagacatcgtccttcaccaagcgttcgctcatgataacggcatcctcgaagttgtaaccttcccaagtcatgtaggcaacgattgggttttgtccaagcgccatttctccattttccatagaaggtccgtcagcgatgaaatcgcctttttcaacgacatcaccaacttttacgagagtgcgttggttgtaagcagtacctgagtttgaacgacggaatttttggatgtggtaaacatccaatgaaccatcttcacgacgaacttctaccttgtcagcatctgcgtaagtaactttaccatcatactgagcaatcacagccgcaccagaatcgtgggctgcttggtattccataccagtaccaacgtaaggtgcctgaggattaatcaatggcacagcctgacgttgcatattggctcccatgagggcacggttggagtcatcgttttccaagaaaggaatacatgctgtcgcaacggcaactacctgttttggtgaaacgtccatgtagtcaacaatattagctggatactcttggttgaccccttggtgacgtcccatgacaatcttctcagcaaaggttccatcttcattcagacgagagttagcctgagctacagtatattcatcttcttcatcagctgtcaaccaaacaatttcgttcgtgacaacacctgtttcacggtcaaccttacggtatggtgtttgaacaaaaccatatttgttcaagtgtccataagatgacaagttattgatcaaaccgatgttaggtccttcaggtgtctcgattggacacatacgaccatagtgagtgtagtgcacgtcacgtacttcatatccagcacggtcacgagtcaaaccaccaggtcctaaggctgacaaacggcgtttgtgagacaactcagaaagcgggttgtgttggtccatgaactgtgacaactgtgatgaaccaaagaattctttaactgcagctgttacaggacggatattgataatttgttgtggtgtcaagacttcattgtcctgaacagacatacgttcacggacattacgttccatacgagaaagtcccaaacgtacttggttggcaagcaattcaccaaccgcacggatacgacgatttccaaggtggtcgatatcatctacacggccaagtccttcagccaagttgaggaagtagctcatctcagcaaggatatctgcaggagtcaccgtacgaaccttgtcatctgggttagcattaccaatgatcgttacgacgcgatctggatcagttggagcaataaccttgaatttttgaagaacaacaggctcagtcacaacggctgcatcgtttgggatgtagacaatcttgttcaagtcgccatccaaatggctttcaatgctttcaatcacgctacgagtcataatcgtaccagcttctaccaagatttctccagtttcagggtctaccaatggctctgcaatggtttggttgagcaaacgtgttttaacattgagttttttattgattttgtaacgaccaactgctgccaagtcataacgacgtgggtcaaagaagcgagctacaagcaagctacgtgagctttcagccgtcttaggctcacctggacgaaggcgttcgtaaatttctttcaaggcttcgtctgtacgagagtccattggattcttgtggatatctttttcaacagtgttgcgaaccaattcgctgtcaccaaagatatcaaagatttcatcatcacctgagaaaccaagagcacgaaccaaggttgtaaatggaatcttacgagtacggtcgatacgagtgtaggtgatatcttttgagtcgctttcaagttccaaccaagctccacggttagggataacagttgaaccatagcccaccttaccatttttgtctactttgtcgttaaagtaaacacctggtgagcggaccaactgagaaacgataatacgttcaccaccattgatgatgaaagtacccatttctgtcatgattgggaaatcaccaaagaaaacttcttgggtcttgatttcgcttgtttctttattgatcaaacggaaggttacaaaaattggtgctgagtagctagcatcgtggatacgagcttcttctagcgtatattttggttccttgatttcatatccaacaaattccaactccattgtgtctgtgaagtttgaaattggcaatacatcttcaaacacttccttaagaccgtggtctaggaaagctttgaatgagtcagtttgaatttcaatcaaatttggtaagtcaagaacttctttgattcttgaaaaactacgacgggtacgatgtttcccgtattgaacgtcatgtcctgccaagatgattctcctttgtaaataagttccaagccttgtcaatcaggcttttctaatcgtcatatggttgtaaaccccttatcaccgtgtcctcttgacgaattttcagaatctttaagcctctgttacaaatgctcaaaatcttgaaaaaaagcacaaaaagagcagctaaatctgactttttcagaagatttaactgctgtgagccttgtctggacaatatttcagacaaaacctacgacaaatgattacccatattataccctatttagctagatttttcaaggggtttcagtaggtttttggtaaattttttcccatagaaaacttggcatcacattcgaatcacgctatggtacaaaaaactgaaaaaactattgactgaaaatcattttcaaggtataataataaacgttaaggcggtatagccaagtggtaaggcacggctctgcaaaagcttgatcgtcggttcaaatccgtctaccgccttctataacttgatttatcaggtttcaaatgaacagaaagcccaatttgaagggctttttttattttccctcgaataaatacgtataactttaaaaacttttggagcgagtttgtggcagagttctttccatggcataattcccttttgaaatcaattgaaaaaagcttcgtcacgcctggtgacaaaagcctctagtttattctgtttcttcttctatttcgacttctgtgatttggacttttaccttggtaacacgtccattcttcactttatcattggttaagataaactgtttgttttggctgaccaattcatagctgagtttctcagtcgttggaatagttcccactcctgtcaaataataaccagcgatagtatcaacgtcatcactttccagttcaacatcaaagtaattattgaaatcattgagggtcatagttccttgaacaatgtaggtatcctcgccaatctgatgaacatctattgctgctttgtccgtttcatcatcaatttcaccaacaatttcctctaagaggtcttccaaagtcaccaaaccagccataccaccgtattcatccagcaagattgccatttgtctttgggtatttcgcagttcttttagcaagtcatccacaaaaatagtttcaggtacaaaaagtggatcttgtaaaattctcttccaaacaatattgtcaaaaccgtccacaaagcctgccttaaggagactcttggtgtgaatgattccaattacattgtccttatccccatcataaaccgggatacgagaataattttgttttaaaatactttggataatggcttgactatcatcctgaatatccaccataaaggcatccgttcgaggaaccataacctctcgtgccatcagttcatcgagcgaaaagacaccttgtagcatctcaatctcatcagcatccaatgtttcttcactatttgtcagcatataggcaatttcatcacgggtcatcttttcatccgcatcatcgaatgacataggagtcaaatggctcaagaaattggtcgaagcagctaaaagccaaacaaaaggactgactagttttccgatcccaatgataatcggcgctgtacgaattgccaaggcatcctttagattaagagcgattctcttaggatataattccccaaaaacgatggaaatataggtcaaaaatgccaaggatagaaaagttgccacggcttgtgctgtttcgccattcccaagccaagaggcaatcacacgtcctagagtatcagttaaactcgcccctgataagattgtaatcagggtgattcctacctggatggttgataaaaagtggttaggattttctagtaccttcagcaggcggatgtagcgtctgtctccttcttccgccttttgttcaactcgggcacgattaagagaaaccatggccatttctgtggctgagaaaaaggcatttaataccgtcaagataaacaataaaacaaattgtagcaacaaattctgactacttgggtcttccatagttcttctcctaaaatagtatcttatcctttattatatcacaaaatttaatccaatacatattattttttcttaccgtaacttctcaaagtaacttccatctctctcccaaaactggaagttagttttagaagttgctattttttcttagtacctgttctagtcctgcttaaactagtaaaaagaactcctacatccataagtgacataggagtttaggcttatcttttactgagttacagttacttctccagttcggtaatccagttgaagtcccttttgaacattgggaactagaacattgaattccaattctccatccgaagacttggcttcaatctgtgaagctgagggaactaaatcctcgtttgaagcgtagtaaagggttacacggtaacggacacgcttgttttggtccaaggctttacgcaccttgctttcatagtagttttgaccagtcgaatactcggcttgtgcctgatttgcccaggctgtctgaacagcaatgtttttaggattgcttgttgaggcatcaaaaccatccaaaccaccgattaaggcatagcctaacaaatgacctctatcgactgcatgggtataagagccctttagattcttgacctgatgccaacctggaggagtccaagaagttgaaccattcccagtttctttacgattcttgtactgacgagtggccttagacaagagggcattagctacggttggaacagtttccttgcccactgtctttgttttattgtcagcgtagggcttacttgaaaccttggcatctagatttgttttattaccattgacgataaaagcacctgagccattccactccagactcccctttatttgactcttgactgcgtctgttaagacactctctgccaatgcttgactaggagcttcagacgcttgttttttctgactaagattggttttgggactattaggtgccgacggcatctgcttgatataatagctccctgtagacaaaagcaataacactagcagtccgattagtgtctgtcttgtttttttgttcatatttctccttatctttagaaaaaggctggttctccagcctaatttcctgtaaatttatgaatcaattcctgccattttgctggagacaggatagcccatggatcttgacccttgcccaagattccataacctaccattaaaccgattcctagagccagagtacctaaaatcagtactatgatgactaaaagtaaacgcttgactacgtagcttgatttcttattcatcttcatcacttgcctcaatccgctgaatcttagcacctagctgcgccaacttctcatggaaaccgtagtaacctctatccaagtgaaccaatttaccgaccacagtttctccctgtgctaccaaacctgtcaaaatcaaggccgcactggcacgaaggtcagttgaaagaacttctgctccctgcaaaggctgtccaccaacaatacgagctgtatcacggataatctcagaatgcaagcccatgcggcgcatctcttctaggtgttggaaacgattttcgaaaactgtctccaccatggttgattcgccttttgcaactgtcatcaaggctgtaaattgagcctgcatatctgttggaaatcctgggtggggcaaggttttcacatgaacagcttttagattttctagttgagaacgaacacgaattccttcgtcttcttcaattacttcaacacccatttcaagtaacttggcaatcaagggacggttgtgctcccagacagcgtctcgaatcaagacatcaccaccagtcatggcagcagctaccataaaggttcctgcttcgatacggtcttggactacattgtgagtcgtaccatgaagtttctcaacaccagtaatggttatagtctctgtaccagcacctttgaccttggctcccatttcattaaggagaatggctaagtcaacaatctcaggctcacgcgcagcattctcaatcactgtcaccccatcagccagagtcgctgccatcatcaagttctgcgttgcaccaacacttggaaagtccatatagatatgagcaccatgcaagcgttctgccttggcttcgatgtaaccagctgtctgactaatcttaacccccatagcttccagacctttcaaatgaagatcaataggacggctaccaatcgtacaaccacctggcatggataccttggcatgacccacacgggcaaggattggccctaatacaacgatggaggcgcgcatcttgctgacatacttgtaaggggcttcctcagtgatgtcgccagtagcatccaccttgacaagatgagcttcctcatcaaagtcaaccttggcattcaaaccaccaactacctgattcataataaagacatccgacaaaatcggaacattctgcaagacggtctttccttcacttgctagaatagtcgctgccaacaagggtaagactgcattttttgctccctcgatcgtcacgcttcctaccagacgattatcgccaccttgaaccacaattttatccatactcgtttcctttactcttgatttcataataatcctctaagcgcttcttgccacaaatgatacaggctaataaagaaagaactcaggatgtagcctatgacaatgctaaaaaaggctactaataaacgaacttttcttgtattatcatctgtcacttttaaaaccttctcccatctaacaagatcctttaaaaggtaaaaactcacataaataaagaacatatgactacttagagtgaataataattgaaccatttgactattataccatcttctctgtttgtgcgctagtttggaaacttcactcaaaaattagggattgtttttcaagtaatcaatcgcatcttgtagggttttaacgggcacgattttcatatccgtcttgattgttttagccgcttctagggctgtttggtagttgtttttcgcgtccggatgcgccttttgttcttcttcgctaacagggttatcaggagcaaagaaaatagcagcacctgccctagccgaagctacaaccttcttatcaatacctccaatgtctcccacattaccatcgcggtcaatggtacctgtaccggcaacaatacgaccattacgaagatctgggtgagctatttgagtatagatagctagactaaacatgagaccagcacttggaccgccaataccagctgttgaaaagctaattgggacattgctgattacctctgtacggtcaatcaagccgattccaattccatttttgccattttccaaggtgatgatttttccttctgcagacttggtttgcccatcctcttcataggtgaccttgacggaatcccctaatttttgagaactgacgtaatcaatcaagtctttggaactatcaaaggtctgatcattgactgctgtgactgtatcagagatattgagaatccctttaaaggttgaattatccgtcacattcaaaacataaactccaaagtacttgagttcgatatccttaccagctgtttttagtccttgatacttggccatattttgcgatgtttgcatgtagaattgattgattcgcataaattcaacatcggaagaaccacctgtagtctcctgagcactacgaatatctgtaaaaggtgtcaaccaagcataaatcatatgagctaaagtggcatgttgaacaccaaccgtaacgaattgataggcaccagcttccttatcttctgtgtcatttactttaaggacttggcgaatatcttccgaaccacctggaacctctatataataaggcaagggcactacaaatgccaagaaagtcacaatcaaggccgcaatgacgtataagggccatctaatcttttttttcatttcttatttcctccaaaatactctcgggaacatagcaggcaatatcctgaccaaacttcaaaagctctctaacgcctgatgaactgatatagagatgttcaggtcgactatgtaaataaatagtctctatatcagaagacagctgatgattgtagtaatcaaaactggcttcatattgcaaatccgacgcatttctcaaacctcgcactaggcaagtagcccccagtctttttgcgacatcgaccaccaatttatcatgagaagacacgactttaacatttcccaaatgtttcacagccttttctaacccccgtttacgattttcaagagggagaaatccttgtttgtggggattaaaaaaaatacccacataaagcttatcaaaaagtctgctcgcccgttcaatgatatccagatgcccatttgtcatcggatcaaatgagcctgtgaataagccaatcttatctgacatagactgtcaccttactaattccataaatcttttccttccagatacccagacaggcaatttcttctggaagttcaacggctttatccgtctcgcacacaaccataacatcttcagaaaaaagctctctctcagccattttttcaatatctgctacgatttgttccttggcatagggagggtctaagaaaacgaggtcaaattccccagatacctgttccaatgccctttctgcatccatcttgaggagttgaaattttccaacttccttggtcatctggatattttcagccacgatggtctgagccttacggtctcgctccaccaaaacagcactggacatgccacgcgatactgcttcgatagataaaccaccactacctgcataaaggtccaagactcgtcccacttcaaagtagggaccaatcatgttaaaaatggctcccctaaccttatccgaagtaggtcttgtcgtcttgccttctagtgtcttgaggggacgtcccccatagattcctgatacgattttcatactgtttattataccaaattatagacaaaaagagaaagaaaaccgaaccttgcggttcgattctctacaaaatattttcgtaagtatcgcggacttcttgaggccaaacacttgtttgcacttctccgatgtgtctcttgcgaagtaggaacatggccatacgagattgtccaattcctccaccgattgtcaatgggaatagaccattcaacaaagacttgtgccattccaattccaagcggtcttcatcacctgtaatttccacctgacgtctaagagtttcttcatctacacgaattcccatagaagacaactcaaaggctccacctaaagactcattccagacaagaatatcaccatttagacccttgtagccattctcagactcgcttgtccagtcatcatagtctggtgcacgtccatcgtgcggtttaccatctggcaactcgccaccgataccaatcaaaaagacggctccaaattctttacaaatcgcattttcacgttctttcggtgtcaagtctgggtagcgttctaccaattcttctgtatggataaaggtaatttgttttggcaagatagactcgatgtcatagcgggcttcaacagctagctcagtcaggcgaatagccttataaatcttctcaactgtttcttttagataaacgatgttacgcttaccatttgggataaccttctcccagtcccactggtcaacataaacagagtgggttgcatccaaggaatcctcatctggacgaagggctttcatgtggacaaagagaccctctccttcaccaaagccaaaacgagccaaggtgtggcgtttccatttagcaagtgagtgcaccacttcataagtagcatcagggatttggagaaccttgaccgatactggattttccacaccagacaggttgtcctgcattccgtcaccgaccttactcaagataggaccttgaacttcgacaacttctagcttatctttcaaatactgggtaaaagtgtttttgacaaaggaaatttcttcttgttgatggataaaacttttcttcatagacaactcctcaaaaatttaataaacgtattatacacctatttccaagaaaagaaaagagaaaatttaaaaaaaatcagtgtcactcaaaacactgatttcatagaccttttagtcattgcgaccaaagatacgtagaatacttaggaaaagattgataaaatcaagatagatgctgagagccattgacaccacccagcctgtcgctacacgaccttgtgattgttcataggcgaggcgaatcttttggttatcccaagcaatcaaccctgaaaaaaccaaaaccatggctacgctaatcatataatcaaagaagccactagccaagaaaatattgactaccatagcaatcagtaaaccaatgagagctgccatcattgctcgaccaatcccactcaagtctttcttggtaaagataccaactgccgccatgacaaagaagagaagggcgctcgatacaaaggcagataaaactgtacccggagtatagaaagccaccacaaaactaagggtaaagccgtttaaaacggagtaaagtaaaaatactggaagagcagctggactatttcttgaagccatgctactggcaacgaaaaccaaagccaactccgcaaaagtagcaatggtcaaccagagacgcccctgcatcaacaagtaaaccaactgagactgaaagaccgtcaacataaggcctgataccaaagcagatagtccgattcccagaccaacaaaggcataaaccttagcgtaaaattgattgagacctgcacggtcatgtataatagtgtgattcatccatttctccttttctgtgaacatctttccttgattataacaaaaaaagttaaaattagcttaaatggaagattaaaataccggctgcaaccgcaacattcaaactctcggcctgccccttcatgctaatatggaccaactggtctgcactttcagccataaggggactaattccttgaccctcatttcccataactagtacaaaattttctatagaaggcagttctctgtaatcaacagaatctttagatagggttgttgctaacactgggatagctacctttttagtttcgtcaagaagcgcttgactagtcatccggtaaatgggcagatggaaatgactaccttgcatggaacgtagggttttgagactgtagatgtctgccgacttatctgaaacaatcactcctgtaaaacctgctgcatccgcagttcgaatgatagttcctacattaccaggatcttgcacatcttccaaaaacaagaacttgccctgactcaaatcagcttgtcctacttcttctttttgaaccacggccacaattccctgtggagtctgagaatccgccaaatctagcaaaatatcctctgacacccagacagtttgcgaaaaagttgctaactgatctcgataattttctagggtaaagattttctcaatcgtcactccagcttgaacagcttcttcaaacaagtgccagccttcaatcaaataggctgacttgcggtattttttttggtgtaatttcttggtattttttaccacagaattggcttttgaggttataatagtcatagaaatattataacacaatcaaaggggtttggtatgcaaaaggttagaatgattgcccaaggtagggtgcagggagtcggctttcgttggggtgtttatagcctggcccttgaaatcggtggcatcacaggtcgggtatggaataacgacgatggcacagtggaaatcttagcccaagcagactcatcagctattatggcaaaatttatccaagaaatccgaaaaggaccgacacctttttcaaaagtcagttacttagatgtcaaactgagcaactttcctccctaccctgactttaaaatcgcaaattaggtctccagaactattgtatattttgtaaaaaaacagtagaatagaaaggtataatttttaaagaaggaataaaaacagtgaaatctattaaacgttttgcactctcggctatgggagtggctatgttgcttgtcttgactggctgtgtcaatgtcgataaaaccacaggtcagccaacaggatttatttggaatacgatcggagcgcctatggctgaagccatcaagtacttcgctactgataaaggtctaggctttggtgtcgctatcattatcgtaaccattatcgtacgcttgattatcttaccacttggtatctaccaatcatggaaggcaacgcttcactctgaaaagatgaacgccctcaagcacgtccttgagccacaccaaacgcgtctcaaagaagcgactactcaagaagaaaaactcgaagcccaacaagctctctttgctgctcaaaaagagcacggtatcagcatgtttggcggtgtaggatgtttccctatcctccttcaaatgcctttcttctctgctatctactttgctgcccaacatactgaaggggttgctcaagcaagctacctaggcattcctctaggttctccaagtatgattttggttgcctgtgctggtgtcctttactatcttcaatcgctcctttcacttcacggagtagaagatgaaatgcaaagagaacaaatcaagaaaatgatttacatgagcccactcatgatcgtcgtcttctccctcttctcaccagctagtgtcacactttactgggttgtcggtggtttcatgatgattctccaacagtttatcgtcaactatatcgttcgtccaaaacttcgcaaaaaagtccgtgaagaactagccaagaacccaccaaaagcaagtgctttctctaaaccaagtggacgaaaagacgttacccctgaacaaccaactgctatcacaagcaagaaaaaacacaaaaatcgcaacgctggaaaacaacgttcgagataagaagaaaaaggcttagctgatttgctaagtctttttgcaagtcaaaagcccgatgtttccatcaggcttcttttctatccatgtacacgtttcatataatcttgataactttcggtatccatgagttgtttagcgttcttgacgcgatctgctgttggtggtttgactccttcgagggaatatggaattccaagttcacgccacttgaactcacccatggtgtgataaggtagaatttcaaacttatcaacatttttgagggtcttgacgaacttaccaagttcaatcaagtcatcatctctgtctgtcaatcctggaactagcacgtggcgaatccagacaggttttccaatatctgatagatactgggcacaagccaagatatttttattggtttggctagtgacaatcttgtgctgttcttcgttgatttccttgatatccaaaagaaccaagtcagtgacagccatgagtttgtcaaacttctcaaggtaacgtggtttattacggaaaggaagagcacaggtgtccaaggtacagtggattccttgttccttagccttggtgaagagagcaatcaggaaatcaatctgcaagagagcttctcctccactgactgtaatcccacccttatttccccagaaaccacggtagcgcaaggcctctgtcaagacatcatctaccgtccgttcacgtgacttattggactccatagcccaagtgtctgggttgtggcaatactggcaacgcatgtgacagccctgcaaaaagacaataaagcgaataccaggcccatctactgacccaaagctttctgtcgaatgcaccattcctgtcacttgtccataatcaattgtttcttcagacatatcgttaccttccttgaaaacgttttatagttttattatatcacgacttgaaggaaaaacaagatttttgcctattttttagaaagcaatctgtttttcaatttcattttcaatctattatcagattattcttcaaaatcgaagccatataaggttgcaaaatagtcctcagggcgctctgcacggcggatttgacgggctttaccttcttcggtatagaggatttccgcagaacgtaatttggcattatactggtagcccattgaaaatccgtgggcacctgtatcatgaatgaccagcaaatcaccgatttctgtatgaggcagttcgcgattaactgcaaatttatcattgttttcacagagtgaaccgaccacatctaccacttcagctggtccatctggatgggtcacgttgctaatatgatggtaagctccgtacatagctggacgcatgaggttgactgctgaggcatccacacctagataggtacggtaggtttccttcttatgagtgactcttgtgactagagcaccgtgaggtgccagcataaaacgacccaattcggtgaaaatcttgacctgaccaagacctgctgacgtaagaacctcttcatacaccttacgaactccctcaccaatcaaggcgatatcgttcggctcctggtctggatgataattaacaccaataccgccagaaagattgataaagtctagcgaaatgcccaacttttccttgatttcaacagccagttcaaagagctgacgagccaactctggataatagagatgggtcacggtattggacgctaggaaggagtgaatcccaaaagtcttggctcctttttccttcaagatagcaaaggcttcaaagagctggtccttggtcatgccaaacttagcctccccaggattgtccataatgtctgtccccagttcaaaaacgcctccaggattataacgacaagagatgatttctggaatgcctgctactctctccagatgttcaatatcttcaaaggcatccaagttaatggtcgcacccaattcacgtgcataggcgtattccttgtctggcgtgttgttggaagagaacataatctcagaacccagaaagtccagtttatggctcatcaaaagctctacataactagagcagtccacaccacaaccttcttcttggagaattttcaaaatagctggagttggagtagccttaactgcaaaatattccttaaagcccttgttccacgaaaaagcttggttgacggctcttgccttctcacgaatccccttctcatcatacaagtgaaagggagtcgggaactcggcaacaatcgcttctaactcttctctattgataaatggtgttttcataagcttccttctattctgtttgcaaagaaaggctgggacaatcgttccaacctttagttctatctcttatttatcttcgtcaaagatattgccaacctcaacatcgatggcttggttcttgacatcaatattggttaccttcaagagtgacttgtagtcaaactgcttttcacgttcttcttgggcattgtccgcaaagaccgctacacctgccagttctgagtcgaactcgcgcaagagactaatcataccattgaccgttccgccacctttcaagaagtcatccacaatcaagacacggctgcctgccttaagactacgttttgaaaggaacattttctcgatacggtcaccacttgaacctgaaacatagttgacgctaacagttgaaccttcggtaattttcaggtcacggcgcacaatgacaaaagagacattgaggacattggcaactgcatttgcaagtggcacacccttagttgctacggtcataaccgcgtcaattttttggtccataaagcttttggcaataatacgaccaatatttttcaagatggctggtgtgctaagcaaatcagacagatagatataaccacctggcaagatacggtcactttctgacaacttggtacgcaagtcttcaaccatttccttagcatcctgactcgaaatagacggtgtgaagatgacacctccgccagccccagtcactgtctggatatgaccgatttcaatttcctcaaaggcgcgtttgataatgacgatatcttctgagatggatgatttagcagactcatacttttcagcaaaagtattgagactagttagtttataaggattattaatcaaatagttggaaatgacaaccatccgatcacttcttcttaatttcatttctatttcctattccatttttattcaaaaaatcaaaaagcaaactagaaagctggtcgctggtggttcaaaacactgttttgagattgtcaatagaactgacaaaccctgtaatatacctgcatatatacatacgacaaggcgatactaccctagtttgaagagattttcgaagagtattcatttttgtcttttacttattataccatattcacataaaaaaacgaacattcttatcctaaaaaatgctcatttttcttaaattattaatctaaatctggtttatagaaggaacgattatccatagcgaagattttattggtcatctctcctttatccaccaaagcaagagctgttgacatcatcatcatgcttgcatccagattgtcaatcatatggataatctctgcttccataatgcgtggacggactgggcttccatactcaagcaagccgtggtgactgaggatgacatgacgaagcaaaacgacttcttccttggtatcatcgatgccgagttccataactgtcttggtaatttcgctatcaatgagagcgatatgtccaagaagattacctcgcactgtgtactctgtctggtctggccccgtcaactcgatgaccttagctaagtcatgcaacataatccccgcatagagcaggctcttattgagctgaggataaacttcgctaatagcgtctgccaaacgcaccatggtcgccgtatgataggccaagcccgtttcaaaggcatggtggttggtcttggcagctggataggagtagaattccttatcatacttggtgtagagatttcggacaatccgttgccagacaggattttcaattttgaaaatcatttgcgacatgtagtcacgaatttccttgacatcaactggtgacttgaccttgaaatcagctgggtcattgggttcaccagcttgaggcaggcggagagtaatttgattgacttgaggggtattgttataaacttctcggcgtcctttcatgtggacaaccttacctgcggtaaaggcctcaatgttatgaggttgggcatcccagagcttcccatcaatctcgccactatcatcttggaaggtaaaggctaggtagtttttcccagctcgagtttgcctcaggtcagctgatttgattaggtaaaagccttcaaataactcatcttttttcatgtgactaatcttcatattcttcctcattttcttgaaaatggagtagatcaagcgcaggctcaccttctgacaactcaatgtgacggagcgtccgctcgatagctatggtacgacggtttaataattcatcaatattgccagaggcatgttggagatgtttttgtgccttgaccagaataccaccaaacttgccaaactcggtcttgacactggcaagagtcttgctgatatggtcggcactcttttggatattaagggtcttgaaaccaactgatagggagttaagaagggctgatagggtacttggtcctgcaacaataatctgttcttcccgtctcaaatcatcaaagaagaccggattgcggacgatttctgagtagagaccttctgtcggaacaaacaaaactccaaaattggtcgtccgaggtggtgctatgtacttgttcctaatatccctagcaaagcgcttgacgcttgctaggagtgacttacgacagcgttcaatctcatccttgtcacctgtctcataggcttcttccaagcggtaataatctgccagtggaaacttagagtcaattggcagatagacgtattcttggtcgccttgtccgggtaacttgatggcatactccactcgttcactagagttttcaaccgttgcgtattctcgttcgtactgggcaggtgtcatgatgtcttcaataatttgccccagttgcaattctcccagaatccctcgcgtcttggttccagagagaaccttgttaagagctccgacatcacgggcaactgtctgcatttctccaaggccacgattgacagactccagttgtttagaaactgtctcaaaggaagcctgtaagcgtgtctgcaaggtcttttctagtttttcctcgaccgtctggcgcatttgttccaaacgttgctcatttgattcctgcaaggcttggagacgttggtctgtcttgtctctagtttggaggagattatctgtcatttcttgacggacttgggtcagaccttggtgcaattcaatccgcacttcttgcaaacggtcgctgacaaccacttccaaatctttttggtctaactggctggcttgtctggcttggtcaaagcggtaatccaactggtctgacaaatgatctgcctgatcctccaagctcttacttaagtgtttctcctgcctatcctgcctttgccaaatcagaaagagaccagctagattggcaattaataatagaataagtaaactttccatcctacctcctgtccttgctatgcagtacgaccacataaccatctgggcaagttaccgacacttccctatctatatattcgttagaagcgtacacttttttaaagaaaaaattttcctctgtcaactcatacttggctccaagaatagtcagctggctatcccgaactggcataaaggctagatagtcgtagtctgaacgaggttctagctgactgattccttctggacaataagtaatcaagttttgcccatcctcaatttctatttgatgcatatagggtgccaacttaggattgctaggcagaaagacattggccaacatatggtcaatacggccacccaaggcaccgaaaatagtgacctgagcctgaggattttgttcaaagatggttaagagagccaattccagatctgtatcatccttttctggtcgtgcttggacaaaatactgggcacctttttgaatcacctgtcgctcttcttccgtcacagaatcaaaatctccgactgctagagcaagaggtaagtcttcttccaagacccagagcgagcctcgatccaccccaacaaaagcatcaaaatctgtccgataatgaccgcggtttccgcctgcaaaaactgcaaccctagtccagttgttttctgagagtttgtactcgctcattgacttctcccttaaagacataggaacctgctacaaaaacagtcgcaccggcttctttggcttgagcaatagtttggtcatcaatcccaccatccacttcgatttcaaagttcaaacctttttcctcacgaagagcaaccaactcacggaccttatccatggtttctggcagaaaggcttgcccaccaaaacctggattaaccgtcatgactaaaacttggtcaactagatgaaggacgtgcttgatggcttcaactgatgtgccaggattgataacgactgaaggcttaactccgagtgaacgaattttttggagggcgccatgaatatgaggcgttgcttctacatggatactgatgatgtctgcacctgcacgcgcaaaatcttccagatgatgctcagggtttgacaccatcaagtggcaatcgaaaaccatcttactatgaggacgaaggctctcgaccacacctgcaccaaaactgatttgcggtacaaaatgactgtccatgatatcgatatgggcatattctgccccagttgcttctagacgtttgatttcacgttcaaagttggcataatctgctgccagaattgacggagcaatcttgtattgagacataggtttctccttattttggaatttttttgctgacttttttataggtttctctacgattttcaatttcactaaggaattgcaggtaattgtcaaaacggaaggttgcaataacaccctcttcaacagctggtttgacggcacaagacggctcatgggtatgggtacaagtacggaacttacaatctcggctaacagtagcaatctctgggaaagcctgattgaggtcttcagcccttgatacttcatagtccaaggatgaaaatcctggtgtatctgcgattttacccccgttgagattgtaaaaactaacagctcgagtggtatggcgaccgcgacctagactgtctgaaatttctcccgtttcaagattgaggtctggtgcgattttattgagaagagttgacttcccaacacctgtctgccccataaagaccgtaaccttgcctgttaacaaagacaggagttcctctttactggtcacaaagtcatagccgatgtcaccataggtctgctggtaaaaatccagttctcccctatcttccaacaaatccattttggaaatatagacaatgggatggatgcccttgtgctccaaaagaaccaagaaacgatccagcaaattgctgttaaaatcaggttccttgacggacatgattactacagcttgatcgatattgacaataggcggacgaaccagactgtttttccgttcgtgaattttgaggatatagccttctgaattttcctcggcagagaaatctacccagtccccaacataaggggtatggccttttttacggaaattcccacgcgcgcgtgtttgataaacctggccatcactctccacatagtagaaacctgccaaggctttaatgatttgtccctgcatcttagagtccttgccctttaagtgcgtctgctagaccggcaaattctgccaagctgagagcttccccacgcacacttggtgacaagcctgcctggtccaaagccttggtcagcttgtccttgacctcttcagtcttaccaaagtaacctgtcaagttattccacaaggtcttgcggcgatgggtaaaactagccttggaaaccttaaagaaaaagttctcatcttctactgctacggctggctctggacgacgcaccattttcaagatggctgaatccacatttggcgctggcacaaagaccgtacgaggcacgataaaggcaaccttggctgtcatgtaatactgcacggcgatagacaagctaccgtaagccttggtgttaggctgggctgaaatgcggtccgctacttctttctgcatcatgaccacaaactcacaaaaaggaatgccactctcaatcaagtgcatgagaataggcgtcgtgatgtagtaaggcaaattagccactaccttgattggcaggtcaggatttttaaaattctggatatgttgcgccaaatcaaccttgagaatatcttcgttaactacggtcacattatcaaaatcacgcagggtatctgccaaaattggcaccaaacggtggtcaatctcaaaagccatgacttgggctgcacgctcagccaaaaattctgtcaaggcaccaatacctggcccgatttcgatgacattgacctgatcatcaatttcagccgtatccacaattttttgaaggatattggtatccgtcaaaaaattttgcccaaaggactttttaaaggtaaaaccgtgacgctccagcactgccttggtcacgctataatctgcaattctcatctattctcttttctattatctgttactactattgtaacacattccccttgtattttgggaatgaaaatcataccaaaaaactatctttcctcatgaagaaagatagtcttggaaatctttaaaagtggccttagcagttctctcgaaacatgcgttcaaaaaaatcagcttcttgataacttcgattttcaggtagggtcaaatccacatcctcctccacatcatccactgtcagttcaaccgtctgaggtaaatttttcaaacgataatgcttttgcctttgcccttcaatactagcaaaatcaagcaaatagccatgcactcggatttgaaccaaaaggagatgattggtcatattttccatgatgaggatatcttctaaaccacctctggcactaggataatcagataccctgcgaatacggattttttcacacatgagcaagtttcctcatatcaatgatttcatcagccttattccagactaggggattatgggtcgcaatgatgataattcgattttcatctttcaaatccaccaagagattcataacctcctctgaattttcaggatcaagagctgctgttggttcatctgccaaaatcaagggtggatttttcaaaatagtcttagcaagggcaactcgttgggcctctcccccagataaagtatagattttttgttctaaatccaaataccctagattaactttttctaaagcccccacttgcctttccaaacgttctacttttgagattttctgaccaacaaaacccaaatccaaattttctttgattgattggttttctaagaggccgaaattttgaaagagatagcccatctggtctcgaaaatactcacgagtgggaatggtttttaaatctttcccctgatagagaacccttccaccatctatcttttctagctttcccaagatattcagcagcgtcgtctttccgcttccactctttccgattaaggcataaaccttgcccttctccagcttgagattcaaaccagagaaaatcgcgcggtcattaaatttcttttccaatccttgaatatcaatcatcttattttcctttcaatactgccatgctaccagcttcttcttttttgtcctgccttactaaaatcaagagggcgttaagcgtaaacaaagctacaactagagcgctaatcaaaccatctcttgtcaaaatactagataggactaggccaagcaagagaactcctccttgcgccagtaaatacttgccatgaagctcatagattgtcataccagcaagacgtttaatcataagttcccgtctgaactgctcaaaatagagaagattcatggaatcaaataacaagatagccgtagacagggtcaaaatcgtcccaataaggagagagtaaaactccacccgtttgtcatttagtaccttggcaaaaaatagctggctttttaccaagtaagaaaccttgtgatacagacctttctcttttagagctgtgatgctgtctccatatcgatctagtttcaaggcactattagccgtagttccccacaacatccctgcaacaggtcttgttccagtcgcttgcggcgttagaactacaataatcggatcttttaggtactggcgtgttgtcttgtacccatcattatagaggaaacgttcctgtcctgtttctgtaaaagctagccttacctgtgggaggtagtgtttctgactcgtcacttctacactttcagatgaaaagttttgcaggtaatctgtaaacaatccttggtagtagacagactgctctcgcaagctctcaggcaagatcagcccaaactctccctcagacaagttttgcatcttgtccataaactctgaagaaacggtaatcttttcttctatcagatagcgcggtgagacatagataacattccctgacggtgtgtagtcactgagacgattgccatctaggtccacttctgctccatctgagaaattgtcaacattgctcataatataaaaagagtctgtattggctaaccgttcttcagtaaatgtctgccactcacgattatccttacgcgttccttcttcatcggcaaatgcactagaccaaccaaaggatagacggtaacggtctgaggactggctccatttattgctagctctctccatttcctgcatttcacggtagtggggtaggagagctgtcgcactcgatccgaccaccaatacagctaagagttgccccaccatcatcaatgtcatcatacgtttgagagggagtttccctttcaatagatccaccagactattttcctgtaaaccaagtagatagacgacacttagtaaggtagaaatccctgccaaggtcaatccataaagtagaagagcaatgatgaccagttgcaccgttgccataaacaaggcaccttgataccagagaatccccaatcccaaaagactggataccagcactgagcagataagctgtctcacatcttctaacactggtctgagagcaactccaaacaagctctcaccagctattaagcgaatccctgcctgacgaagggatttgatccgataaatcagggtcagactcataaaggtcagcagaaaaatagctaaactcagtagcaccataggggtggccgtcaatagtaagactatcgaaaatggatcttctccattcgaaacaaagccttgataaccaagctctttcaaggtggtctgtaagctcactccatccaaacttcctgatacaatcaagtaagaccctaataaatcactcgtttctgcactctccttggaggaaatggtcagaccttctggaagctttccctcaccataagtggcataggtaaagcgtgtttctccagcttcatttggctcaacgattcgacgagcaatgagactattgtgctctaccgccaagtgactcaaagcctctgtcacctcttcgcgactagctactggttgatttatcatcattcctgtcacatcaacagaaggatagttaccaaataaaatctcttctcgatggtcaacggaagttatcaccatataaagcgatactaataccattgaaatcaaaataaataaacgtttcatcatttcctccaaaaagttacttggtcacttcgtgagaaggtgaccacagtcactgcgatgttaagaagcttattaagttctttctgctagcaacatcttcaaatacattatatccgttttttcaagaactatcaaggacatcaatgtccttaaaatctaaccatttcgtgtcatttttagcttatatctaaaaaaacatccctaaagacgaactttagaactgttttgatacgaggacaaggacatctttgtcactgattcactatgtttataaatattttttgacatcctcttgccattcctctgtcaatttctttactagaaattcatctccaattagctgcgcaaatgttttagaagactgataaaatgattcagctaaactaaaatctctttcttctcttaatgcttgcttccacaaaaacataaatacaagaggtttcttttgataatcttgagttttatccataatttcttgtaaacacgatagataatcattaaaacaatcagttactcctaccttttcaagacaacacattcctgaaataagagtatctctaattataaagtaattctctatttgagttaccttcttctgttccaaaagaaagagcattagcttttcgatttgatttataaatttggcaagatcttttctaatgagcatttgataaaaaaacaaacgaatcaacaacatatcatttattgaataagcttctttttctataatctgaggcatatgttcctcaagtattaactctgcatattcaggccttctagttctagaagtatccaaacacgcctgcaatacttcacatgctaattgttcttctttaggaagattatcaaagtatgttttataaatctcttccaaacacgcttccttcttatcgtactcctcttctttaccatagattggttcacgtaaaatctggtatttcaattctaaataagcagaaggaagagctgaaaaatccggcataaggctataaactggaactcctagccggcgagcaatatagtctaacttgggcaaactcggttgcgaagctccactttcaattcgcgacagttgacgaactgtcagttcttgctcatctccacaaaaatctggacgactaattcctttttctatccgaatctctttaattttttgaccaattaacatcagacgcctcctcttctacctgcttcgaaaaatactgtgaaacttaaaaaattgtaacggctacatctttcctactcataagatttcatagcttcttccacttctgccaaagtaaccccaaacaactctaggcgtttgaggagttgcttgccgttggaatagccgattcggagagtctctccgagatattctctacgcttacggctgtctgcccctgctagaaaaccaaggcgaatcaaatcgctacgactaatgtcaaactgactctcatgttcaaattgttctgtcacttgagctagagccgttttcaggtcttcatagctggcatgctcaattcccagagaacgccccttggtcttggacttgggaacagcttcatctcgcttgagaaaggcatgctgaactgttggaatgaccatcatgatcatgcgccgaatccgttccccattaaaatctgggtctgtaaagacaatgactccatgacgttggtgcaggcgctgaatccgctctatatcctgagcattgatggcagaacctcgagtctcataggtctccacatcgaaataacgtttgagattgaccgtatcatcacgcccttcaaccacgataacttgagaaattttctctttcattacttgctgtccagtccaaaaattcgttctgcatttgcagtcgttgctaccgccagctcttctgtcgtcataccacgcaagtcagcgataaagtcgaccacatagcgagtataggctgttttattttcacgaccacgcttgggtacaggtgctaagtaaggcgcatctgtttccaccaacatcttgtccaaaggtaactctttagctgcttcttggaggtcagttgccttcttaaaagtcaccactcctgagaaggaaatggtcataccaagatccacaaacttctctgcccactcaagcgtccctgaaaatgaatgcatgataccaccacgaggaccaacgccctcactcttgataatctcataggtatcttccagcgcatcacgggtatggacaacaaaaggcaaatccaagtccttagatagctgaatctgacggcgaaaaacctgctcctgcacctctttgggcgctgtcatccaatggtaatctaagccaatttcacctaaagccacaaccttggaatgttttaacttatccaacaagtaagcctcaacttcctctgtataagtaccagcttctgtaggatgccaaccaatagtcgcatagagctgctcatactcatctaccaactccaaggcatgctcaatcgtcggtttatcaaaaccaacaatattcatctgtgtcacacccatctcagcagccaaggcaatttcttctgcctcacgacctgcaaattcttctacattcaagtgtgtatgtgtatcaaaaatcatctcttctaacctcgttttctatcttctattataccaaaaaagaggaggggcacctaatttttcggtttcccctcctctcttcaatagagagctattctgctatcttttctatccgatattgcccatctcctattccacagttagagacagaagagattggctacattgatagaatattcctattcagctaaagtatgtgattatcttgggttctcacttttctcacccatcactaggattgatgacttctcaaaatcccccttataatctaactttaagtagagaatagaattttctagctgttctattttctacgtctagtctttcttcctagcaaagcaaaaccacttgttgccaccactagaccaagactagcaagtgctgcacttgatgctgaacctgtgttaggtaattgtttgccagcaggtgactggtaggtaacatcttgcattgttcctgcagttgcttgcggtgcacttgttgtcttaggagcagcattaggagccactggtctcttaggaactgtaaccatggcaatggcttgcactccaatcgtttctgcttccttcacatcttccatagttttcgcattttcaatctctttgagagctgcttgtttttctgcttccactcttgctaaaagttctgctttttctttatcagaaagcggtgcgcctttgatttcatcctgcttgtccttggctgctttttcaatggcatttttagctgattctttttcagtagctaattgcttagaagcttgtgattgagctgagttttgtgaacctgtgtgagctgatccacccgcctggctaccaccgccttcattcgcattagcatctgagcttccagtattgcctcccttatctccacctggtgtattttctagcttatactctggtgtagcttcttgagttacagattcacctttcgcagattgttgaactgtatcttttcctagaatcgtcactactgaaccatctgggaatgtgattgttgctgtaccatctccagctacattgattgtcgctccgtctaatgctgaaccatttgcttgtaaaatagcaaccttaactttttcttcatctgttaaatgagttatatcttttacatctactctttgagcaggtgctttaacagttgatttttcagcagtcagtttagtgctatcttgtgcttttggatcttgtgctaccaattgatttcctggaattgtaatagctgaaccatctttaaagacgattgttgctgtaccatctccacctacttcaactttatagtaaaataaaataataacaggacaaatcgatcaggacagtcaaatcgatttctaacaatgttttagaaacagaggtgtactattctagtttcaatctactgtaacatcgcttccgaatccatttgcatctactgaacttttttacaaaaataaaaatcagtagactcgagttcctactgatttttgatagaattcgtttggattatgcagccaaaactttgcgtcctttacgacgacgagctgccaatacgcgacgaccatttttagttgacatacggttacggaatccgtgtttgcgcgcacgacgaagtttacttggttgataagtacgtttcacgatgaatacctcctcatagattttgtattcgtttagccggctataaagtgatcagttactaaacatactttactattctatctgattctttcacttttgtcaatagctctaggcaaatgtttccagctttttcgaatgcaagccctatctacgatactgtttcaagaaacgagtcatcttttcttggatttgggctaactcatcaacacgaggaaggtaaacgatacggaagtggtctggttcctgccagttaaagcctcgaccatgaaccaagagaaccttttcctgcttcaagaaatcaaggacaaactgctcatcatcatcgatacggtacatattgcggtcgatttttgggaagatatagagccccgccttgggtttaacggcagacaaacctggaatatcttgaatggcattatagatgaaatttctttgctcgtagattcgtccaccaggaagaagcaattcatcgactgattggtgaccccccaaggaagtttgtacgacttgttgggccaaaacgttagagcaaaggcgcatattggacagcatattgagcccttcgatatagcccttaacatgagtcttagggccagacaagaccatccaacccacacggaaacctgctatgcggtgggattttgacagaccattcatgctgacacagaagacatctggtgccaagctcgccacaggcgtatgcacatgtccgtccattaccatgcggtcatagatttcatccgcaaagataatcaaatcgttttgacgggcaatctcaataatctccagcaagagttccttaggataaagggctccagttgggttatttggattgataaggacaattgccttggtattggaagtgatttttgacttgatatcgtcaatatctgggtaccattccacagcttcatcacagatatagtgaacggcatttcctccagctaggctgacagccgccgtccatagaggatagtctggcattggcactaagacctcatccccattgtccaaaagcccctgcatggacatgacaatcaactcactgacaccatttccaaggtaaatatcatcagtatctacgtttgggaatttcttcagctggcaatactgcatgatggccttacgggctgagaaaatccctttggagtcagaatagccttcactatcacgcgcattcataatcaagtcatgaatgacctcgtctggcgctgtaaagccaaattctgctggatttcctgtattcagacgtaaaatcttttctccattcgctcgcatccgcatggcttcttccaatacaggaccacggatatcataagcaacatgctctaacttactagacttgttatattctttcatcttgtttcctcaattcatcaggatagtaacattataccactagaaagagaatgcgacaagtttactgaaatgtgttactagtttcgtatagaagaaaaaccttgctaaaggcgaggttaagaacgtagagatagcaggtattttgcaaagacacatcacataccaaaagataaacctagaaaaaagcaagcctagaaaggagtcataaagaagattaaacatgaggaaaagcccccatatcatcaagtaatcccaacgcccacttcgttttgcaactagaaataagattagatggtagagtacatgaaaaactaaaaatccaataaaacttggataaagaagcggtaccagactctctaattgacagatcatgatcacttctaccaagactgaaactaggataattccataataaaggaaatttgatttttgaaaagagtttttcatcattctcccttccttcacttctttcctgctatcctttcttttattttatcatatatttatatagagtttaagccctaatattcttttgaaaaatactttttttgctttacttctatagtgaaaaggtttacaattatagtaagaaaatttcaggaggtttcattatggcacaacgttaccaaaatatcatggtcgcaatcgatggttctaaggaagcggacttggcttttgtcaagggagttcattctgctctacgaaacgacgctaaactcaccatcgcacatgtcattgacacacgcgctctccaaagcgtatccacctttgatgctgaagtttacgaagaactccaagtcgacgctgaaagtctgatgaaagagtacgaaaaacgtgctaaagatgctggggtagcagatgttcatatcgtcattgaaatgggaaatccaaagaccctgctagcacgtactattccagatgccgaggaagtggacctcatcctcgttggcgcaactggtctcaacgcctttgaacgcctcttggtcggctcttcatctgaatacatactccgccatgctaaggtcgatttgctggttgtgagagaacaagaaaaaaccttataatcacaaagaaaaggagcccctagctcctttttgtttacgatttatttctctctttatggcgttcgtaagccttgagctggcgctgcagttcctttttaatagcaggttctggagcatatttttcttcccaattatctggttttaagattttatgggtcactggatcaaaatgagccttgccatctggaaaaattttccccatattggcctgatggacaatatcaaaaatacgttctgggtccacccccatcaagacaaaactgccgtaggtgaagtaaagcgtgtcaatcaaggcatccacttgccctatcaaatcttgctgagcaggtgtcttcttggctactttatctgctgccttatcaagggcctgatgaagttgcgatacagcttgaccaaaatcttcttcagaaggactggctgctcgaacaaactccaccaattcttctattttaaaaccagccctatgggttgcaccctctaaatcccaagctcgaggttcttcttgggttcgttcatccatcatgtggtggaaggtcttgaccttattgaaatgatagtcacggctgacaaagactttttctgaagacaaaacaccaaaatgttccaaggccttgtggattccatcttgttgattgctagtggtaatgtgcttggcagcttccttgacactgctactaccatttcccatagcgaccgacataccaacgccagccagcatttcaagatcattatctgagtcaccaaaagccatgacttggttgaggtcaaagccatattctttcccaactcggcgaatgccttctaatttagaatttccctgattgatgacatccgatgcaaaaggattgctacgtgtcaatttcaagtcttcaaaatcagctgccgccttctcagattcttctggtgtcatcagcatcaaaacttggtagataggctgattcatcaggtgaagcaggtcctcttccttttggggaacaaccttgctgaccatgcgattaaaagactgactcaccgtccgagttaaaacagagggaacgaagcgactaattcgttgggaaaaagaacccagaccaaaggacatgattttagaacccaacatggcatccttggtccctagagcaatctccgtgccctcttttttagcatagctaattagatggcgcaaatgtaacttggaaatagggctcgtgaacaagactctgtctttactaaagatatactggccattataggttaccgcaaaatccagatccaaatcgtccatcaattccttaacaaaaaaaggtcctcgccctgtcgctacgccaactagtaccccttgttctttgacaatcttaatcgcatccttagtggatttcaaaacactcttgcgattgttgaccaaggttccatcgatatcaaaaaaaacagctttgacttccatcctatcccaatctccccttttgtgatacaatgattataccacatttcagaaagagtgagtaaatcatgcctaagaaaatccttgttttacatacgggtggaactatttccatgcaggccgatgcttctggcgctgttgtgacgagttcagataatcccatgaaccatgtgtccaacccacttgaaggaatccaagtccacgccttggacttttttaaccttccaagtccccatatcaaacccaaacatatgctggtcctctaccagaaaattaaagaggaagcagataactacgatggagtggtgatcacacacggaaccgatactttagaggaaacagcctatttccttgataccatggaagttccccatatgcctatcgttctaacaggagccatgcgtagctccaatgagctcggtagtgatggtgtttataattacctaagtgctttacgagtggccagcgatgacagggctgctgacaaaggagttttggtcgttatgaacgatgaaatccacgctgccaagtatgtcaccaaaacacatacgactaatgtcagcaccttccagactccaacacatggcccccttggtctcatcatgaaacaggaaatcctctacttcaaaacagctgaacctcgtgttcgctttgaccttgatcacatacaaggtttagtccctatcatctcggcttatgctggtatgacagatgagctgattgatatgctggatttagaacacttggacggtttgattatccaagccttcggagctggtaatattcccaaagaaacggctcaaaaattagaaagccttctgcaaaaaggaattccagtcgctctggtatcacgatgctttaacggtattgccgagcctgtttatgcataccagggtgggggcgtacagttgcaaaaagcaggcgttttctttgttaaagaactcaacgcccaaaaagctcgcttgaaactcctcatcgccctcaatgccggactaacaggacaggctttgaaagactatatggaaggctaatactcttcgaaaatctctgcaaaccacgtcacgtcgccttaccgtatgtatggttactgacttcgtcagtttcatctacaacctcaaaaacatgttttgagctgacttcgtcagttctatctacaacctcaaaaacatgttttgagctgacttcgtcagttctatctacaacctcaaaaacatgttttgagctgacttcgtcagttctatctacaacctcaaaaacatgttttgagctgacttcgtcagttctatctacaacctcaaaaacatgttttgagctgacttcgtcagttctatctacaacctcaaaaacatgttttgagctgacttcgtcagttctatctacaacctcaaaaacatgttttgagctgacttcgttagtttcatctacaacctcaaaaacatgttttgagctgacttcgttagtttcatctacaacctcaaaaacatgttttgagctgacttcgtcagttctatctgcaacctcaaagcagtgctttgagctgacttcgtcagttctatctacaacctcaaaacagtgtgttgcgcagcctttaatcagccgcctagtccgctctatggtattcattaagtcaacatctcttgtttaagagcaccaaatcaggaaatcttctcgattccctgattttttctatttacgttttcgtgttgagctacgttctgtcaaaccatgaggtaagagaacttcacgttcttccaactcttccttatgcataatcttggtcaacatacgcatactaatggcaccaaggtcataaagaggttgggcaatcgttgtcaagtttggacgggtaaagcgtgagatttgtgaatcatcactagtaataatttcaaaatcttctggcacagaaacacccttatcagccaaaccgttcaagactcctgctgccaactcatcacctgtcacaactgctgcagttgcatttgatgaaatcaaacgctctgctaaggcgtaaccatcatcatagctatatttagattcaaataccaaaccctcactataagtgattcctgcttttttcaaggtttccttgtagccaactaaacgaaccttaccattgatgtcatccactagcggaccgctaacgaaagcaatacgctcattttctttagcaaggtaactcactgcatcaattgttgcttgcttatagtcaatattgacacttggcaactggtgctcaacatcgacagttcctgcgagaacaatcggagtacgtgaacgcgaaaattctgagcgaattttatctgtcaagtgataccccatatagataatgccatctacctgctttgaaaagagggtattgacaacagaaacttctttctcgttatcttcatcgctattagctaggacaatattgtacttgtacatttctgcaatatcatcaatccccttagccaaactcgaaaaataaccattggtaatatttggaatcacgacaccgacagtggttgtctttttacttgcaagaccacgcgcaactgcatttggacgataatccaaacgatcaattacctctagcacttttttacgggtattctcttttacatttttattgccattgaccacacggctgaccgtcgccatggaaacacctgcttcacgagcgacatcataaatggttactgtatcatctgcattcattccttttcctgtcctttctatctcacacattcttttacaagtagaggtactgattgaagctctatatctacttacaaaagtgaagatgtgaaaatttcgttttcatatttctacttattccattctatcactaattgtaaacactttcaagtgttttttgaagattgattgaaaaaatttcatagaaaacctaggtttagctccttgctaccaccttagactaaacaaaaaggaggaaactaagccctcctaaagttatagtaaaatgaaataagaacaggataaatcgatcaggacagtcaaatcgatttctaacaatgttttagaagtagaggtgtactattctagtttcaatctactataggtattgttccattcactaccgtcaattttagcacatagtcttcatgaaaatattatatcatcataaccaaccagattctttcgcgatattagctgcctctgttcgattacctgcatctagtttcgaaagaatattggtgacatagtttcggactgttccgttggatagataaagtttgtctgcaatttcttggttagagaagccctgagcaattccctttaaaactgcgatttcttgctccgttaatggattgggatgcatcatcaccacttccatcaattcaggcgaatactccttgcgtccttcgaggacggtgtgcaaggtttgcatgaggtctgcaatgtttctttcttttaatacataagcatctactccagccttgaccgcacgttcaaaatacccaggacgcttgaaggtcgtcaccacaaccacctttgtttcaagcttttctgctcgtatccactccaagacttcaagacctgtcttaacaggcatttctacgtcaaggatggcgatatctacagactccttttctaatagttggattgcttcttgcccattcttggcttgaaagacagactctacatccggttgaagcatgagcaactggcacatggcatctcgcaacatactttgatcttctgcgactaatactttcatctactttctctccttataaagtagtcgaacctgcacttcagttggatgtttctgactgattacacttacttctcctgaaaatggaaaaacacgatttcggactgtatggagctcatccccgcttatagaggcaaagccacagccatcatctctcactgttagaatgagttctttctctgtccgttctaatttcaagtagactttagacgctttagcatgtttgatgatattggtcactaattcaagcaaaatcatggaagccgttgactccaattcctgagttaagctagacttgtccaagtgattctcaacttgaacctcaattccagcaatttctaacatctttttcacagtctctagttcggatgtcaaagttctagacttaagattttccacaatggttcgcacttcattcatggaatccttgctgatctggtgaatttcttttaattccttttccacctgtggataagcctccatctgaaataactgcaaggctaaatctgtcttgacactcagcatagcaaaggtatgtcccagactatcatgcaaatcctgaccgatacgactacgttcattttcagcaagcaatagatttatctgagcattttgcttgacctgagcttctttcaaatcctcgacaatacgaatccgaaccaatccaaaagtcattaaatcgacaaaagtaagaattacaagtagatagaatagaaactcaacttcgattctctgaaaaatcaacagttgccccacaacaaggacttgagcaagaagaaaagtccagacatgtaaagactttaaactacgtacgctgaaatgataacttaagagattggataggaaaaagaaaaaccagatataattaacagcaacaaaggcagtattcccaactacataagtcagcatgaggccccaatatagccaagataggcgctggctcttagttgttaaaacacccaaatatgccactacaaatagaatatcaatcaataaatgccaggcagaaagccacccagtcactacagacaggatggggaaaatcataaaaattaaactgatccaaaacatataatgtattcttttcagtctttcaagcattaagcattctccttatgaccttgaaggtaaatggtcaaaccaaacaaaactactgaaaaaacaagtaaataaactgtggctgatagattgatgccaccctcatttaagaaggtcttgagcaactccatcaactgataggtcgggagacacttacctactacttgcatccagtctggaaataaagagataggcatccagagtccacctaaaacagccaaccctagataaagaagattgcccacgacagacatcaactgactagttggtaagagagtcaaggtcaaaccaagcgctacgaaggcaatacttcctactatcagcaaaagtgcagccccaatccaatttccaagagacatgtccacacctcttacaaaatgcccaactgagaaaaccaccaagattgaaaccaaataatcaaccagcatacttgttatctttgatagataatattctaccatatttacagggctatgacgcaatgttttctgccagttgttgatcttgtcggtatgtaaaacaactgggaatgagaagatagctgttgacatcatggaaaatgcagtcatggagataagataatcacgcataaaattcgcgagttcacctggtgtgtcctgatagataccagaaaaaaataaatagaaagccgtcggcatccctactgacaatagataatagatcaattgtcgtttggtcaataaaaattctatcttactaagtgctagccatcgtttcatcttagttatctcccttctgcgtttcttcaaagattgtatccaacaaactacgattattaacttcaatttcttgtatgccacatcctgcttgaactaacagttcccaaaaagcatctgcttcgcgtgtgactacttgtagagcatcctgtttttgtgaccagttttcaaccaagttagactgctcaatgacttccttgtatgccagaggaaggataaaatgcttttcaattccctcactacgcatagctagaggcgtcgtatcacgaatcaactctcccttatttaaaaccaaaatccggtcagccgtatgctctacctcttcaatataatgagacgaatagagaatcgtgactccttgcgcttttaggtcccgaacgatttcccaaaagcgttgacgagttgaagtatccatggcagcagttggttcatctaaaaagacaagctttggtcgcccaatcaaggtcaagacaaaagagaagagacgcttttgcccgcctgacaatttttctgcgaattgctctttttgttgctggtcaaactgcaatagttgatcgatttcctgatcgctcaaggaatttggatagatacgttgaaagaaagcaatcaactctttgacctttaatttctgaacgatgacattttcttgaggcagataacctctaatatagtctaactgagaactcgtcactgacaagccttggatggatacttgaccgcttgtgaccagtttatctccaagcagacagtccaagagtgtggtcttcccagcaccattgggcccaatcaaggcgacgcattcaccttcagctacctcaaaggaaatacccttcaaaatagccttgcccttgatgtttttatttaggctttctaccttaatcatattcatgatattctcctttcaaccactccattctcataaggaaaacgacgaaaatcataaatccaaaccccaaagcaccacgaatgaattggcgaagcaaggtttggtcaaaccaacctgtaaacatttccactaaccataccaagagtgacaggccgataaagaaatagatgatccctctcttcattcctcaagctcctttttcacatctccgactaatttcaaaccttctctaacaagccaagacatcattccaaagccagcaaagagctcccaaggaaaatgatagaaactctcatccaatcccgaaaacatgagttaggtcataactcctgctactactaaactcactgcgataatcattttatttctcatctcttcttcctccatttcatactacaattatagtcttttgaaatcagaggagacagaagcttctgtcactagaaaatatgacaaatgtcataaaaaattctgttcaaaacaagcaagatacactatacaataaaacacaattagaaaaatctaaggcaacttcctcaaaagagatatcaaacccaattcacaccataatgtaaactaatacttatttaaaatcaaaaagagtagaaatttttatcagacaaacacatatatagtgtattgaatctataacagtaggccttaaatactaaaatatttctataaattaatttaactttcctgatagagctgttcatatcttatttcaattctctaaattatacgttgaacaaaacccttctatttctttcttaaagatttataagagttataaaatctgttaaatttcaatgtgtatacctaaactacggtatttattgaaaagactggagacaaaaagtatacgctgccaaaatgaattactgaaaatcaaaaaagagagaaccaaactgattccctcttaatgtatataatatctagttttaaaaatacacactcacatatctctgtaatgaatcgggaagacaggattcgaacctgcgacaccttggtcccaaaccaagcactctaccaagctgagctacttcccgagttaaatagaaaaatgcaccctagaggagtcgaacctctaaccgcctgattcgtagtcaggtactctatccagttgagctaagggtgctccatattatgccgaggaccggaatcgaaccggtacgatcgttaccaatcgcaggattttaagtcctgtgcgtctgccagttccgccaccccggcctctctaagcgaacgacgggattcgaacccgcgacccccaccttggcaaggtggtgttctaccactgaactacgttcgcactgttttcttctatctaaaaatgccggctacatgacttgaacacgcgaccctctgattacaaatcagatgctctaccaactgagctaagccggctcatttgttatatcttaatgcgggttaagggacttgaacccccacgccgttaagcgccagatcctaaatctggtgcgtctgccaattccgccaaacccgcatatatgacccgtactgggctcgaaccagtgacccattgattaaaagtcaattgctctaccaactgagctaacgagtctaaaataacttgcgttaccttaaacggtcccgacgggaatcgaacccgcgatcttcgccgtgacagggcgacgtgataaccgctacactacgggacctttgggagttaacgggatcgaaccgctgaccctctgcttgtaaggcagatgctctcccagctgagctaaactccctagagctaagcgacttccctatctcacagggggcaacccccaactacttccggcgttctagggcttaacttctgtgttcggcatgggtacaggtgtatctcctaggctatcgtcacttaactctgagtaatacctactcaaaattgaatatctattcaatttaagaaaaccgttcgctttcatattctcagttactttggataagtcctcgagctattagtattagtccgctacatgtgtcgccacacttccacttctaacctatctacctgatcatctctcagggctcttactgatatataatcatgggaaatctcatcttgaggtgggtttcacacttagatgctttcagcgtttatcccttccctacatagctacccagcgatgcctttggcaagacaactggtacaccagcggtaagtccactctggtcctctcgtactaggagcagatcctctcaaatttcctacgcccgcgacggatagggaccgaactgtctcacgacgttctgaacccagctcgcgtgccgctttaatgggcgaacagcccaacccttgggaccgactacagccccaggatgcgacgagccgacatcgaggtgccaaacctccccgtcgatgtgaactcttgggggagataagcctgttatccccagggtagcttttatccgttgagcgatggcccttccatacggaaccaccggatcactaagcccgactttcgtccctgctcgagttgtagctctcgcagtcaagctcccttatacctttacactctgcgaatgatttccaaccattctgagggaacctttgggcgcctccgttaccttttaggaggcgaccgccccagtcaaactgcccgtcagacactgtctccgatagggatcacctatctgggttagagtggccataacacaagggtagtatcccaacagcgtctccttcgaaactggcgtcccgatctcttagactcctacctatcctgtacatgtggtacagacactcaatatcaaactgcagtaaagctccatggggtctttccgtcctgtcgcgggtaacctgcatcttcacaggtactaaaatttcaccgagtctctcgttgagacagtgcccaaatcattacgcctttcgtgcgggtcggaacttacccgacaaggaatttcgctaccttaggaccgttatagttacggccgccgtttactggggcttcaattcataccttcgcttacgctaagcactcctcttaaccttccagcaccgggcaggcgtcaccccctatacatcatcttacgatttagcagagagctgtgtttttgataaacagttgcttgggcctattcactgcggctgactttaagtcagcaccccttctcccgaagttacggggtcattttgccgagttccttaacgagagttctctcgctcacctgaggctactcgcctcgactacctgtgtcggtttgcggtacgggtagagtatgtttaaacgctagaagcttttcttggcagtgtgacgtcactaacttcgctactaaacttcgctccccatcacagctcaatgttatagaattaagcatttgactcaattcacacctcactgcttagacagactcttccaatcgtctgctttagttagcctactgcgtccctccatcactacatactctagtacaggaatatcaacctgttgtccatcggatacacctttcggtctctccttaggtcccgactaacccagggcggacgagccttcccctggaaaccttagtcttacggtggacaggattctcacctgtctttcgctactcataccggcattctcacttctatgcgttccagcactcctcacggtataccttcatcacacatagaacgctctcctaccatacctataaaggtatccacagcttcggtaaattgttttagccccggtacattttcggcgcagggtcactcgactagtgagctattacgcactctttgaatgaatagctgcttctaagctaacatcctagttgtctgtgcaaccccacatccttttccacttaacaattattttgggaccttagctggtggtctgggctgtttccctttcgactacggatcttagcactcgcagtctgactgccgaccataattcattggcattcggagtttatctgagattggtaatccgggatggacccctcacccaaacagtgctctacctccaagaatctctaatgtcgacgctagccctaaagctatttcggagagaaccagctatctccaagttcgtttggaatttctccgctacccacaagtcatccaagcacttttcaacgtgccctggttcggtcctccagtgcgtcttaccgcaccttcaacctgctcatgggtaggtcacatggtttcgggtctacgtcatgatactaaggcgccctattcagactcggtttccctacggctccgtctcttcaacttaacctcgcatcataacgtaactcgccggttcattctacaaaaggcacgctctcacccattaacgggctcgaacttgttgtaggcacacggtttcaggttctatttcactcccctcccggggtgcttttcacctttccctcacggtactggttcactatcggtcactagggagtatttagggttgggagatggtcctcccagattccgacgggatttcacgtgtcccgccgtactcaggatactgctaagtacaaagactattttaaatacgaggctattactctctttggctgatcttcccaaatcattcttctataatctttgagtccacattgcagtcctacaaccccgaagagtaaactcttcggtttgcccttctgccgtttcgctcgccgctactaaggcaatcgcttttgctttctcttcctgcagctacttagatgtttcagttcactgcgtcttcctcctcacatccttaacagatgtgggtaacaggtattacctgttgggttcccccattcggaaatccctggatcatcgcttacttacagctacccaaggcatatcgtcgtttgtcacgtccttcgtcggctcctagtgccaaggcatccaccgtgcgcccttattaacttaaccttattttctgacctttcagtcataaactcttattaatactacagcgttttcggtttattttcttgttactatttgatatagatattcaattttcaatgtgcattacttggtgatctctcaccaatggagcctagcgggatcgaaccgctgacctcctgcgtgcaaagcaggcgctctcccagctgagctaaggccccacaagacctctcaagactaaacaagaccaatgcgcagttccttatccttagaaaggaggtgatccagccgcaccttccgatacggctaccttgttacgacttcaccccaatcatctatcccaccttaggcggctggctccttacggttacctcaccgacttcgggtgttacaaactctcgtggtgtgacgggcggtgtgtacaaggcccgggaacgtattcaccgcggcgtgctgatccgcgattactagcgattccgacttcatgtaggcgagttgcagcctacaatccgaactgagactggctttaagagattagcttgccgtcaccggcttgcgactcgttgtaccagccattgtagcacgtgtgtagcccaggtcataaggggcatgatgatttgacgtcatccccaccttcctccggtttattaccggcagtctcgctagagtgcccaactaaatgatggcaactaacaataggggttgcgctcgttgcgggacttaacccaacatctcacgacacgagctgacgacaaccatgcaccacctgtcacctctgtcccgaaggaaagctctatctctagagcggtcagagggatgtcaagacctggtaaggttcttcgcgttgcttcgaattaaaccacatgctccaccgcttgtgcgggcccccgtcaattcctttgagtttcaaccttgcggtcgtactccccaggcggagtgcttaatgcgttagctacggcactaaaccccggaaagggtctaacacctagcactcatcgtttacagcgtggactaccagggtatctaatcctgtttgctccccacgctttcgagcctcagcgtcagttacaagccagagagccgctttcgccaccggtgttcctccatatatctacgcatttcaccgctacacatggaattccactctcccctcttgcactcaagttaaacagtttccaaagcctactatggttaagccacagcctttaacttcagacttatctaaccgcctgcgctcgctttacgcccaataaatccggacaacgctcgggacctacgtattaccgcggctgctggcacgtagttagccgtccctttctggtaagataccgtcacagtgtgaactttccactctcacactcgttcttctcttacaacagagctttacgatccgaaaaccttcttcactcacgcggcgttgctcggtcagacttccgtccattgccgaagattccctactgctgcctcccgtaggagtctgggccgtgtctcagtcccagtgtggccgatcaccctctcaggtcggctatgtatcgtcgccttggtgagccgttaccccaccaactagctaatacaacgcaggtccatctggtagtgatgcaagtgcaccttttaagcaaatgtcatgcaacatctactcttatgcggtattagctatcgtttccaatagttatcccccgctaccaggcaggttacctacgcgttactcacccgttcgcaactcatccagagaagcaagctcctccttcagcgttctacttgcatgtattaggcacgccgccagcgttcgtcctgagccaggatcaaactctcattaaaaagtttgagttcttactcatttctgtcactgacagatttattgtttttttcattgttcagtactacaacttacgttgtagcgccctgcacattggttcgtcttgttcagttttcaaaggtctttgtcacttgcttctctcaagcgacaactatattagtatatcacaactgctttcgcttgtcaacacttttttgaagatttttaagtttttttaaactttttttcatcaagtggtcctgacgcaacataccatagtccgtacgggattcgaacccgtgttaccgccgtgaaaaggcggtgtcttaaccccttgaccaacggacctgagttgttattttcaactcttactattatacagccttttcaaactttgtcaactactttttctaatttttttcattttttttgcatgacttactagtgggtacggatagtaaactccttaaacacaatgcgtaagtctcttaatactctttgacgccctcgaaatcgttcattgcttaagacgcgttctagttcttcttgtttctctttactttgtttgtttctataatctcttagtgtttcatgaaagagataataatcatctagccagagacccccctcacttatacgatgactgatctcacccacttcttcatagggttctttatcgtatctacgcttctgactttcctgtttacggatatagtctaaaattcgatttcgaaacttggtcttgaaatatttccttaaacgtggaatatcgtctaccagtccttcttctctactaatcaattcatgtaagcagagcatgccttcttgctcccaatccgacaattcccataaatgaaggtaatattcatttctacacttatacacagtcccttggacttcttcatacaattctttaatcataattttcccctttctagatacagtctaacagattagaaaacacatttgttccattttctccattctgttccctttagctcctaaactgcacaaaaaagagaagctccagcctctctcagggttataattctgcgatttggtttagatttacttctgcaactgtgtcattaccaaacatagagataatcattttcactttgttattatcaatttctgtaatcttaccagtgtagtctgcaaaagcaccatcaataatacgtacagtttgaccaatctcaacatcgaaatcaaattcttgaacagtttgtcccatagataccaaaatgtcgcgaatttcttgttccaataatggagttggttttgatctgttcccgtgtgatccgacaaatcctgtaacatttggtgtgtttcgaacaacaaaccaagcttcatctgtcatgaccatttctacaagaacataacctggaaagcgattttcttctacttcttttctctttccatttttttcaacttgcactgtttgtgttggaatttcaacgcgtagaatattatccaacatattgtaggtttgtgcacgttgtaatagattttctttcaccttattttcataaccagaataagtttgtaaaacaaaccaccctttatcaaaactatccatgatatttcctttcataaatagaagatttctagtgtaattaactccactaatcttctaaaaaatgttaataaatcgaatcaaacctgaaacaatcaactggtcaaaaatgtaaataattactacaaagaaagctgtgtattccatgatagaacgaaaatctctccagctttccttgcgagttggccatgttgtgtctttaagaagtctaaaaatatctccaataaaacgcatcgctctctcctatctcgtttctctgtgtgtagtgtacttgccacaatgcttacaaaatttatttacttctagtcgtgtaggcttgaggtttccgctgatcttgattgaatagtttctcgaaccacaaaccgcacaagctaggcttgctttttttagtgccataacgcctccatcttatccattataacaagaaagctaggctttgacaagcatcttagcgaaatagattgactatcgaatcccatattgtttgagccttttccttaatcttcgcatctgagatagcccggctagcctcatctactagactttgcgcacgccctcgaatatcagacaaattatcatctgtctggctattatcattggtttgtacttgtctttttgtattggctggtgcaattccattttgcttataagcattttcaaccgtaaaggtacttcctggcgtataaggtaaaatggtattggcaatgtttctaaagacatgagctgcaccgtttgaagtagagccagctagatagtggttttcatcagtggtcggaaagccaagccagtggctaatcactacatccggagtataaccaattacccactggtcacttgtgtactccggattgaaaactgcttcagttgttccagttttccctgccatgacatagtctgcaggcgatgaactaataccggtaccgttggtgaaagtccccaacatcatactggtcatcttgtcagctacagacttatcaatcacccgtttttgtgaatttttatgactcgcaataacttgtccactagcattttcaattctactaataaaatgagcttcaggcattaaaccttcatttgcaaaggcggcgtatgcttgagccatttgaagagggttggtttcaacaccgcttcccaaggcgacaccaagaacacggtcgaccttttccatgttgagtccgaatttttcgcctgcctcaaaagccttgtcgacacccaaatcattaacagtggcaacagcaggtagattaagcgattctgccaaggcttgatacataggaacttctcgactcgttttgatccctgcatagttatcaaccttatagctgtcatactgcatggtatggttatccaactgcttattcaaagcccagcttgcttcaactgctggcgtataaacaactaaaggcttaattgtagaaccaggactacgctttgattgggttgcatagttgaaattccggaatccagttttatcattgtcagcaacttgaccgacaactccacgaactccccctgttttcggttcgagggctacacttcctgattgagcaaacgttccatcctctgccctcggaaatagcgatgtgttttcataaacaatctgcatatttgcttggtagttttggtccagctctgtgtaaatgcggtagccattattgacaatctcttcctctgttagattatacttggaaacagcttcattaaccaccgcatcaaaataagaggggtaacggtaatctgagatttttccttcatacttatcgtgcaattgcgaagtcatatcaacttcagcagctttggtttcttggtttttatcaatatatcctgctgcaaccatattctgcaagacagtatcgcgccgattagtagaatcttctacggaattcaagggattatacagttccggccccttgagcatccctgccagagtcgcagcttgatccagactcacttctgatgcagaaactccaaagtatttcttactcgcatcttctacaccccacacaccatttccaaaataagcgttgttaaggtacatggttagaatttgctccttactatattttttgcttaattctaaggcaaggaaaaattctttcgcttttctctcaacagtttgatcctgcgataaataggcgtttttagccagctgttgggtaatggtagagccaccacctgaacgtccagcagtgacaatagccaagaaaaaacggccatagttaatcccgtcatttttatagaaagaacggtcttctgtcgcaataacagcattctgcaagtttttactgatgtcagtcagctcaacataggttcccttttgaccagacaaggcaccagcctctttttcttcacggtcaaaaataagagtccgagttttcaaggcattttgcaaatcattgacattggtcgacttggctacagcaaacaaatagattccaactagcaagcctgcactcaaacctagtataaggataatctttgttagatgataacgacgccagaattttcgaatcggacctacttgggctaatttttttcgatcactacgagagcgacgtaagatagtagaatcagagtcctctagttcacttgtttcttttttaaaaagagaaagaaatttctcaaataatttatctaatttcatgcgtttattttatcatcttcatcataggaagacaagaatttagctatttcctatccaaatagggctttttttgttacaatatctgtatgcaattcacatttacattacccgcctctctacctcaaatgacagtaaagcaattacttgaggaacaactcctcatccctagaaaaatccgtcattttttgagaatcaagaaacatattttgataaatcaagaagaagtccactggaaggaaatcgtaaatcctggagatgtttgccagttgacttttgacgaggaagattattcccaaaagacgatcccttggggcaacccagacttagtgcaggaagtttatcaagatcaacacttgattattgtaaacaaaccagaggggatgaaaacgcatggtaatcaaccaaacgaaattgcccttcttaaccatgtcagtacctatgttggccaaacctgctatgtcgttcatcgtctggacatggaaaccagtggcttagttctctttgccaaaaatccttttatcctgcccattctcaatcgcttattggagaaaaaagagatttctagagaatattgggctctagttgatggaaatatcaacagaaaagaacttgttttcagagacaaaattggacgtgatcgccatgatcgtagaaaaagaatagttgatgcaaaaaatgggcaatatgctgaaacgcatgtaagcagattaaagcaattctcaaacaagacttccttggctcattgcaagctaaagacagggcgaacccatcagattcgtgtgcacctttcgcatcataatcttcctatcctgggagaccctctctataatagtaaatcaaagacaagccggcttatgcttcatgccttccgactttcctttacccacccacttactttagagaagctaactttcactaccctttcaaatacatttgaaaaagaattaaaaaagaatggatgatcgtgtcatccatttttccatataaaaaagcaagaccacaaagccttgctttctatcaactcaagaattatttagcaatttttgcgaagtattcaagagtacgaacaagttgtgcagtgtatgacatttcgttgtcgtaccatgatacaactttaaccaattgtttaccgtcaacgtcaagaactttagtttgagttgcgtcaaacaatgaaccgtaagacatacctacgatatctgaagatacgattggatcttctgtgtaaccgtatgattcgtttgaagctgctttcatagctgcgttcacttcatcaacagtaacgttcttttcaagaactgctaccaattcagtaactgatccagttggagttggaacgcgttgtgcagatccgtcaagtttaccattcaattctgggattacaagaccgatagcttttgcagcaccagttgagttaggaacgatgtttgcagcaccagcgcgagcacggcgaaggtcaccaccacggtgtggtccgtcaaggatcatttggtcaccagtgtaagcgtggatagtagtcatcaatccttcaacaacaccaaagttgtcttgaagagctttagccattggagccaagcagtttgtagtacatgaagcacctgagataactgtttcagtaccgtcaagaacgtcgtggttagtgttgaatacaactgttttaacgtcgtttccaccaggagcagtgataacaacttttttagctccacctttaaggtgtttttcagctgcttctttcttagcaaagaaaccagtagcttcaagaacgatttctacaccgtcagtagcccagtcgatttgttctggatcacgttcagcagaaactttgatgaatttaccgttaacttcaaatccaccttctttaacttcaacagtaccgtcgaaacgaccttgagttgtgtcgtatttcaacaagtgtgcaagcataactggatctgtaaggtcgttgatgcgtgtaacttcaacaccttctacgttttggatacgacggaaagcaagacgaccgatacgtccgaaaccgttaataccaactttaactaccattagtgatttcctccttatgaaaatcatgaaatttttattgtgaaaagagtaacttgaatcactacaaatcacctttcaacaaacctattatacaactatttgagttgaattgcaagtatggccattgtttttctatgttagtttctttttaagactgtaaaccaaggaatcccttactattcatagcataacgattctataggatccattttactaatcttacgcgccgggaagtaggctgagacataaccaagtaatagagcgaaaactagagttcctaaaacagataaaagatttaatttaaaaaccttagtgatggatgggtaaaagtgacttacaatcgcattcgccaaacttcccaccccttgtgcaaccaaaaatgccagcagcaaggcgatgcctacaatccagatagcctcgtaaataaaaattcctttgacatcacgattctgataaccaactgctttcatgacacctatttccttggaacgttgcatgatattgatgtaaataatgataccaatcataaccgctgctaccacaatagcttgtgatgaaagcacaatcaataatccctgaataacacgaataaaggtaatcacaatatcaagaactctctgttgagaaagcacagtatacttcttatttttctgtaattcttctgttactacttttgtctgtgatggatctttgagttccaagataaaataagatacagctttcgtaaatccagcctctttcaaaatcgtttccatttgatgagacagcatgaaactgttgctgtcctccatgtcatcttcatcattgattacacgtacaatcttcgtttgaaattgagcaatcttactagtttcggcagcactttctacaatgctggctgagactgatttgccaataagatcattagctgtcaaattttttcctgtctgttcattccaattttttagtaaactgcttggaatcgttaatccctgttcatttgtatcagtatagagggatccagccaacactttgtccgtctcattattactaacagagatacttgtatcatcataaagactcactacttgagcataagaaggcatcgtttgactcagatccatttcttgcccatctatagtaatatttgacatgttcatcccaaaaggactctccaaatatttaatagcttctttcccaactgtatccgtgatatatagtcaattgaaacaagagcaggataaaaaagcctcgtaaaaggtattgcaacttggtaatacctttttgaggtgctttttgatatgagcccatgttttctcaataggattgtactcaggcgagtagggaggaagaggtaaaagtttatgcccaaactcttcgcataaaagttctagcttccccattctatggaatcttacattatccataataataaccgatggtgtgtttaatgttggtaagagaaaattctgaaaccaagcttcaaaaaagtcgctcgtcatcgtctcttcgtaagtcattggagcgattaattcaccatttgttagacctgcaaccaaagaaatcctctgatatcttcttccagatactttgcctcttattaattgaccttttaatgagcgaccatattctcgataaaaataagtatcgaatcctgtttcgtcaatctaaacaggtgctaggtgctttaaactattaaaattcttaagaaataaggctactttttctgggtcttgttcatagtaggtgtggttcttttttcgagtgtagcccatagctttgagcgtatagtggatggtagttggatgacagccaaattcagaagctatttcagtcaaataagcgtctggattgtcagtaagatagtttttaagtctatctctatcaacctttcttggttttattccttttacttggtggtttagctctcctgttttctcttttagctttaaccagccataaatggtattacgtgagatttggaaaacgtgtgatgcttctgttatactacctgttcgctcacaataagagagaacttttttacgaaaatctattgaatatgccataaaaagattataccacattgtgtactatttttggttcattttactatatttgaagaggcgtttaaactatctgacataaaactcgttctagaggaaagacatcctttaaaaagttagtttattttacaacttagacatcaaggtaggttaaccccttcatggaaaaatcaagactcttagcactatgggttaaactaccactggagacgtaatcaatcgctaaaccacgaaaacggctaatagtggtcatatcaatatttccagaacattcaatccgagaacgtcctgcaattagggtaatggcctgttcaatctgttccaatgacatattatccaacatgataatatcagcacccgccgccgcagcttcttcggcagcagcaaggctttccacttccacctcgaccattttcacaaaaggggcataggcacgcgcttgagcaattgccttttgaacactacctactgccgcaatgtgattgtcttttagcaggatagcatctgataaattaaagcgatgattatagccaccgccaactctcacggcatatttctcaaaaagacgtaaattaggagtagtttttcgagtatcaaataccttaatgcaatcatcgcctaaggcttctacataagcagctgtcatcgaagcaatccctgataaatgttgtaaaaaattcaaggcaacgcgttcacatgttaagagacttctcaccgagcctatgatttctaaaaccaaatcgccactagtcaaacgatccccatccttaaattgatgaggattctggaaggtcacctcggcatcaaatagggtaaaaaccctttgaaaaacggttagccccgctaaaacaccagcttccttggcaaaaagcgacaccttggcttggccatgatgatcaaaaatggcattggtactgtaatcttcggaatgaacatcttctcgcaaggctgctttcaatgtatcatctatttgaaaaggggttaaatcagttgaaatgattgacatcactaggtcctctatttttaatatcacttgtaagcattagaggcaatcactattaacttccataggaaatcacaagcctgaatacctcatttttaattctaacaagtgtcaagacaattgtcaagacaattgtattttttttgtgtataatagtcaagtaccaataggaaacaggtggtcttttgagcgccaaaattgccaacctatttccatattctaactgaaaggacaattcaatgattcatttaataatgattagcgccattgctctagccattggaattggttaccgcaccaaaatcaatattggcctgctggctattgctttttcttacctcatcgcaaccactctcatgggattaagccccaaagaacttcttcatttttggccaacctcactcttttttaccatttttagcgtctctctcttttataacgttgcaacaactaacggtactcttgatgttttggctcaacacattctctaccgcacacgcacccaccctaacgccctctacatgattttatacctgatggcaacccttttgtctgctttaggtgctggatttttcactactatggccgtttgctgtcctctagcgattaccctctgtcaaaaagcggacaaacaccctttgattggagctcaagccgtcaattggggagcttcaggaggggctaatttgataaccagtagctcaggcattgtctttcaaggcctgtttaagcaaatgggatgggaagagcaagctttttcacttggcaatcatatctttatcgtcagcattatctacccactcatcgtcttgcttttattatcctgttacagtcactatagtaagggaagaacaaactcatccttgactattgaccaaccaccactcctcagcaaggttcaaagacaaaccaccttgctcatgatcagcagcatggttttggtttggctttttcccttgttgcatctcattttcccaaacatcgcctggatagctacttatcaaaaaacatttgatattggctttgtctcaatactcatggtctgcctcgccttaaggctcaaattagggaagcaagaagccattttagctaaggttccctgggctacaattatcatgctctgcggcatgagcttactaatgtctctagcggtcaagtcaggtttagtcacactgatagggcacctcatgacaacaaccattcctcatttctggttacctctgttcttttgtgtgatagccggagtgatgtcactctttagttccaccctatccgttgtagctccagccctctttcccatcattgctatcatcagtgctcaaaatcctcagattgatattcacttactcacaacagccaccgttattggcgctctatctactaatatctcacccttttcatcagctggttctctcattcaactctcacttcccaatatagaggaacgtggccttgccttcaaaaagcaaattattctgggtgtccccatcagcttaagtttgggactcttgaccacctggattctcatccttctagcttccttaagttagatttattatctaacttaagggtggacttggtataataaagtagacacaaaattaagtggaaacgaggaaaagtcattatgccaagaaaaacctttgataaagccttcaaactctctgctgtaaatctcatcctgtaaaaatgattagttcaactttaaaaattcatcccaatagtctttatcgatggattcaagaatatgaaaaatatgaagaaagtgcgttcccaggacatgggagcgcacttcgtcatactcaatttgagatatagtgaaatgaaataagaacaggacaaatagatcaggatagtcaaatcgatttctaacaatattttagaagtagatgtgtactattctagtttcaatctactatagtaaagttgactttcctgtaccatttttaccagtaattaatgtcacgtctgaactcgaagtatcaaaagaaatattatcaaacaatttacgatgatccaccctatacgaaatattttctactttcattttttctccttttgaactaatagcaaaagaaacagttctgttttcatactctttccccttcatctatattattcgtaatgaaaaataaaaaataaaatttttttaaatgattatgatttagaatttatttaatatattaaaagaagatatgaacaaataaattgggagattgaaattcatttctagcaatttgttagaagtcacagtctactattctaaccacagtatactatatgtgttacaagaaaagactcaaaaacttctcgtcagtgtaagaatgtttgaaacactatttaaaactaaataactataagaagtagatcaggtgaacaatttcagtacctactctataagctatacgaagatatttttcaacatgatggatacaacgatcactcttttaaagccatcttatttagaaaagagaaaccatttaagcatagatgggaccttcttgccctgttttaaatttttcttaaactagagtctgtaaaagattggcttcattttcacattttctcctaggaggaatgtcgtaatgcaaaagaattaaattcaaataaatcatagcgatgacgactaatcgagtactcaaacggagttccgttatccaaataagccacttgttctacttcaaataccggttccgttggaaggagctgcaagtaatgttgctcattttctgaactagaagaagctcgtaagatttttgtagcactggcaatatgcaatcctaactttccttcaatgtaattgtaaatcgatttttgtaaaatatcttcagtaatacctggaataacatcggtactcatataagtttgttccagaacataaggtttaccgtcaataatacgcaggcggtaaatattataaactggactctgcaaagcgacctgtagtttttctgctaaaaattcatttgcaaattctaatttgaagtgaataatcctcgagtcaattgtagaatgagcatcttcagatatttttgtcagtccccggatatctctttctggaacgattaattttctttttgagctgccacgagagagaacaaaggttccctgcccacgttttctaaaaattaagccctcagaaactaacaagtctaaagcttttttgatcgtcattcgactacaggcaaactgtttagctaatgtcatttcatcaggcaattgttcgttcatggtatatttattacaaagaatcttttcacgaatctcattgtaaataaataaatattttgtactcatttaatctggttctctctataatattctaatagtagtataacaaagttcaagaaatgaggcaaacacaagatatgtatcaacaatttttaaaaatgtctagacaaattttaaaattatgctatactttatgtatagaataatagaaaggaggttgagcatgaaaaaaaagttagtatttcctaatctgttttggtggggagctgcttctagcggacctcagacagaaggtcaatatggaaaagtacatgaaaatgtgatggactactggttcaaaacgcatccagaagattttttcgataatgtcggacctcttgtagccagtaacttttttcatacttacaccgaagatttccacttgatgaaggaaattggagttaattctttccgcacttccatccaatggagtcgactcatcaagaatttagagacaggtgagcctgatccaaaaggtattgctttctacaatgccatcattgaagaagctaaaaagaaccagatggatcttgtgatgaatttacatcattttgatttaccagtggaacttcttcaaaaatacggtggttgggaaagcaaacatgtagtggagttattcgtgaagtttgccaagactgctttcacatgctttggagataaggttcattactggacaactttcaatgagccaatggtcattccagaagcaggatacttatatgctttccattatccaaatctaaaaggaaagggaaaagaggccgtacaagtcatctataatctaaaccttgctagtgcaaaagtgattcaactatatcgctcattagaacttgatggaaagattgggattattttaaacttgacacctgcttatccaagaagtaattctccagaagacttagaagcaagtcgatttacagatgacttctttaacaaagtcttcttgaatccagctgttaaaggaactttcccagaaagattggtaaaacagctagagagagatggcgtgttatggagtcataccgaaaaagagcttcaactgatgaaatcaaatacggttgattttcttggagtaaactactaccatccaaaacgtgttcaagcacaagcaaatcctgaggaatatcagacgccctggatgccagaccaatacttcaaagagtatgaatggctggagcgtcgcatgaatccatatcgtggttgggaaatttttccgaaagccatttatgatattgctatgattgtgaaggaagaatatggtaatatcccatggtttatcagtgaaaacggaatgggtgttgaaaacgaagcacggtttatcgatgaaaatggagttatcgatgacgtgtatcgtattgaattttatgaagaacatttaagatggctacataaagccattgaagagggaagtcactgttttggataccacgcttggaccgcatttgattgctggtcttggaataatgcatataagaatcgttacggatttatctccgttgatttagaaacgcaaaagagaaccatcaagagctcaggaagatggtatcgcaaagtaagtgacaataacggttttgaagtagaaattgaggagtaaagagaggagatattcatatgaaaaactcaaaatttatagaccaatttgccacctttgctggtaaactagggaaccaaattcatttaaaaaccctaagagatgcattcgtaacagtaatgccattatatattttggcaggtttaatcgttcttttgaacaacacggtatttaagtggattttccaaggggatacattaacaagattccaatattggggaataacaattgcaaacggtactttaagtatttcaggtatgattattgctgtaatggttggttatttcttagctaaaaacagagatttcgaaaacccgttagcagcatcaatgctatcattagtttctttaattgtgatgatgccaaatacagtttctgtagttcctgacggagcaaaagatgcggtaaacatttcaggtgttctttcattcaacaacacaggtacaggcgcaatgttcgccggggttatcgtagcgattattgcaacagaattattcattgaattatcaaacgttaaagctttacaaatgaaccttggtgaaaatattccaccagctgttagtagatcatttagcgtattacttccagtcatgaccgtcatctccttatttggggttgtttcagcattattattcaatataactggaatgaacttaatctcaatcattacaatctttattcaagaaccaattcgtcatattggtacaagcttaatcggggtcattattatttactctttaggaaatatgttatggctatttggtattcaccaagcagttatttacagtgccatcctagaaccattactattaattaacattactgaaaacatcactgcagcaaataatggacaagccattccacacatcatcaacctatcacaaatacaaacattcgctttaatgggtggtagtggatctacattatgtttattaatagcaacattcttagtgagtcgcaatgctgtctctaaaaacgtggctaaattatcttttggacctggtatcttcaatatcaatgaaccagtattattcggttacccaatcgtttataacatttcattagctattccatttatcacagttccagtccttggtattttaatcagctacttagcaacagttacagaattcatgagtcctgcatttatacaagttccttggactacaccagtattcttaaatgcatggttagcaacagcaggggacgtgagagcagttctagttcaattcatcatctttgcacttggagttcttctatacattccatttatcaaagttaatgacaaagttgttgaacaagaaatggaaggttaagattatgaaacaaattttattagtatgtaatgcgggaatgtcgacaagtatgcttgttaaaaaaatgcaacaaagtgcgactgaacgtgggattgaaatctctatccaagcaaaatcaatgacagaagctaaaaagaatatccatgaagcagatgtcattctaattgggccacaaattcgttatgagttacttgctgtgaaagaaattgcaggaaatatccctgtagataccattgatatgcgggattacggaatgatgaatggagcaaaagttctggaacaagcacttgcatggataggagaaataagatgacagaagaaatggaatatatctgttttcagctcattgccaatagtggagcagccaaatcatcctttattgaagccatccaactagctaaggcaggaaatttaaaagaagcgaaaattaaagttgaagaagcggaagactccttagtagaagcgcacaagattcactctaatctcatacaaaaagaagctactggagaaaaaataggattctccttgctatttatgcatgcagaagaccaaatggcttcaacagagattattcagttgctatctaaagaattcatcgatctctatcaaaataaataggaacactgtcattcccatctgtctttattaatgacgactacattgtaggaacctccaaaagttggacaaaatgattgaaaggattggatcctgcattacacaagatccaatccttttcttttactctagtttttataatatgttgaatctagaatagtccactgtagtttctaaaaaattgctggaaatggatgttaagctccaatttatttgtttatatcttatttcagtttactatactagcttattattctagtgaaaaattgaatgagccactatttatttaatatgtatgatgagggaatgactcaaaaacttcttgtcgatataagaatatctgagatagtattttaaaacgaaaggactataaaagctcatttccttcgcacttattttatagagatctatcattatactctttagaaatcaaaaagcaacacaccttgtcatcgttttatcgtaaatctgttaatgagggggctagtcttatctgcaatctcaaatcagtgttttgagctgaatggcactcgttttctagtttgctctttgattttaattgggccttagtaaatactactcttaaattaaactatagtgaattgaaataagatgtgaacaactctatcagaaaagtaaaattaatttctataaatgttttagcaattgtttcgtactattttagattcagtctactatactatattttttatatatcaaaatgaaataagaacaggacaaatcgatcaggacagtcaaatcgaattctaacaatgttttagaagcagatatgtactattctagtttcaatctattatatattttgtttctattctagtttttcaaaaagggcaaaaaggcctcaatatcataaaaaggcatcctatcaggtgttcaaaaaccttgataggatgccttttatcatagaaaaattactggatctttccctcaaattgagtttttgtcttgcttctagactgataaacaattatttacggcgtcctggtctttctttgtagccatagtatgcatcttcgatgatttcttgcatatggtctaccattggaagacgtgggttagctggtgaacattggtcttcataagccaggaaggctaatttacgagaatgttctttccattctttttcgtcaattccttggtctctaaaattcatttggatcccaatacgttcaccgagttcgtagacagcttttgcgtaagattcaaccccttcttctggagtagaagctggaagtccaagcatgcgtgcgatatcttggtatttttcatctgcacggtagtagttgtacttaggccatgttgctgtcttagctggacgtgtaccgttgtaacggataacgtatggaagcaagatagcatttgtacgaccgtggattgtgtggaattgcgcaccaatcttatgggccattgagtgagaaatacctaggaaggcattggcaaaggccataccagcgattgttgaagcgttatgcattttctcacgtgagtggaagtctgcattcttaactgagctttcgagattttcaaagaccaatttaatggcttgaagtgctaaaccatcagtgtagtcactagccatttgtgatacgtatgcttctgtcgcgtgagtcaatacgtccataccagtatcagcagcaacaaatcctggaactgtcaataccaaagcaggatctacgattgccacagttggtgtcaatgagtagtcagcgattgggtatttacggttgtttgctttatcagagataacggcaaatggtgttacttcagatcctgtaccagatgtagttggaatcgcgatgaatttagtcttcttaccaagcaatgggaacttgaaggcacgtttacggatatccatgaatttttggacaaggtcacggaagtccacttctggttgctcgtagaagagccacattactttggcagcatccattggagacccaccaccgagtgcgatgatggtatctggtttgaaggcacgcataatctcagtaccacggtttacagttgtgatatctggatccggttctacatccgcaaagatttggtaaacaaccttattgcgacgaaggtccagttgttcgatgatacgatcaaggaaaccaagctctaccatggcatggtcagtaacgatcatgacacgttcaacgtcacgacatttttgaaggtattgaattgaatcacgttcaaagtatgtttttgaaggaagtttcatccattgcatgttatttctccgtcttccgacttttttgatattcaagaggttaatggcactaacgttatccccaactgagttgcgtccgtaagaaccacatccaagtgtcaatgatggcaagaaggcattgtaaacgtccccgataccaccaaaagtagaaggtgagttacagataacacgaatagctttaacagctttaccaaattctttagtcaattcttcgtcagctgtgtggatagctgctgagtgtccaagaccgttaaattcaaccatttgacgagccttagtaataccatcttcacggctttcagatttcaaaactgcaataactggtgacaatttttcacgagtcaatggctcattttcgccaacttctttacattctgcagcaagaatgtttgttccttctggaactgtaaatcctgcttgttctgcaatccaagttgctggtttaccaacgatgtcagcgttcaattttgcaccagcacagtttttgctgtttgctttgacgccgaagcagaactcttcaagaagagctttttcttttttgtttacaaagtaagtgtggtaagatttgaactctgctacaaattcatcgtaaatttctttatcaatgataactgcttgttcagatgcacagaccataccgttatcaaatgatttagacatgacgatatcgtgtgctgcttgacgaatgtttgctgatttttcaacataagctggaacgtttccggcacctaccccaagagctggtttaccacatgaataagccgccttaaccatggcattaccacctgttgcaaggattgtcgcaacaccttcgtggttcataagggcacttgttgcttccatagatggttgagtaatccattgcacacagttttcaggagcaccagctgcgatagctgcatcgcggacgatacgagctgcatgagcagatgattcttgtgctgatggatggaaggcaaagacgattgggttacgtgtcttcaatgaaatcaatgatttgaagattgctgttgatgttgggtttgttgttggagtaataccacaaacaacaccaactggttcagcaataagagtcaatcctgttacatcgtcttcttcgataacgccaactgtcttagtgtggcgcatgttgtttactacgtgttcacaggcaaacaagttcttagttgctttgtcttcaaatacaccacgtcctgtttcttcaaaggcatgtaaagccaattctccgtgggcatccaaagctgctactgatgctttggcaacgatgtagtcaacttgttcttgatccaatttacgcatttcttcaagggcaactagagctttttgaaccaactcatctacgtgtttttcagcaacgagtttcttttcctctggtgtcacagtttttttatcagccatattttcctccatagctttcaaggaacgatatcctttgttaattttttcacaagtttattataacgcattatttcaactttgtaaacagtttcataaacatttcacaaagaatttttaaactcttgtgaaacttttctcattttcttttcttatcaggttttatctttgaagtttgtgaaatttatttcaaatattttttatttcacaaacttgcttggaagagggatttggaaagaaagggatttgcaggtaagcgcttaccttgcgattctaataatacctcctttgataaggaggctttatttttgttgaaaaacgccttgtttaaaagttccttcataaacgacttcttgttctgttgttagtttcccttttccttcagcctgaccatttacaaaatcaccttcgtaggtccagccttctttagattgaaaggtaccttttccgttgaaggctccattgttgaagccacctgtatattggtctccattttggaaggtaatggtaccttggccattcattttaccgcggacaagactgccatcataaacaatcgttccattatcgagttttaagacaccttttcctggaatatttagaaaaaagacgagtacagcacagaaaacaatggtaactactgccaaaagctctaaacgtggacgagtcagatagacacgatacttttcgtaaaaattcgtaagattttccaccttaactctccttttctaaacgttctaaccaagcttgacagccctcttgaacacgtcgataggtttcttcaaaatctcctgtataccaagggtctggaacactttcagatgaaaatgagtaaatcttatcttgacagtctactggacacatctgacgtaagtcagaaatatttgaagcgtccattccgataatataatcaaaggcttcaaaatcttccttactaatctgaagcgatgtcttgttcttgtcataaggaatctcatactcttgaaaaattccctgagtccccttatgaatcggattgccatgttcccaagaggaagttgctcgactttggatttcgtagttatctgtcattgatttcataacaaactcggccatagggctacggcaaatatttcccagacagacaaagactaattttttcatcccatttcctttcttttatagaaaacgggagttcgtgatcccgtcttatttttcaattgcgccttctagtgaagctgtttctttcagcggtaatactgtcttgatagcagctagttcaaaagtcaagtaaactccatctacgtcaagaactattgttcccttctccgtatctacttcatcgactgttccataaagtccaccgattgtaatcacttcatagcctttttgtagtttatttaagctttccatacgcttttgagcttgtttcttttgagaacgttgcataaagaacatcaaggccatcatacctacaagcatgattaaaaaagtaatatttggattcattgttttctcctttgtcttttacataggactactatatcaaatttcagctacttttacaagattgtaccttacttttctggtaagaaaaaccagagcttacgccctgatttttaggattatttcaagtttcgaacaacttttacaagattttctacagtaaagccatattctgccaatacttttggtgctggggcagaggctccgaaggtatcaatacctagaacggcaccatcgagaccaacatatttgtaccagttttgacttgcacccatttcgactgcaacacgacggcggactgcatttggaagaatttcttccttgtaagctgcatcttgtttatcaaagacatctgtagatggcatgctgactacgcggattttttcgccttgactagccaattctttagcagctgagacagcaagattaacctctgaacctgtcgcaatcaagatggtatcaaagtcggctgcattttcatatacaacataagcacctttagcaaccttgtcgaagtctgttccatcttcaacagtcaaattttgacgtgtcaagacaagggcagttggtgttttctcacttgtcactgcaaggtaccaagctgcttgcgtttcacgcgcatctgctggacggaaaacatttagatttggcatagcacgaagacctgctaaatgctcaactggttcatgagtcggaccatcttccccaactgcgattgaatcatgggtaaagacataagtcacaggaagtccttgtaaggctgacaagcggacagctgccttcacatagtcagagaagacgaagaaagttccaccgtatacacgaagtccaccatgaagggccatcccgttcaagattgttcccattgcaaattcacgaacaccaaactgaatgttacgattcaagcgattggcatcgtcttgaagtccatccgtcttgatataagtcatgtttgagtgagcaaggtcagctgatccacctagaaaggttggtaatttagctgccacaacattcaaggcatcttgacttgaattacgagttgcttgagaaaaaccattttctaaagctgggaagtctgctggagtcacttcgactggatcacgtccgtcgatgatggcttctacttctgcagccagttctggatgagcttctttataatctgcaactaatttagtccaagcttgataagctgatgcgccacggtctgcaacatgttctttgaaatcagcatatacttgttctggaatttcaaatggttcgtagtcccaaccgagggcttgacgagttgatgcagtttcatctgctccaagaggggcgccgtgtacagcattagttccttgtttgtttggagaaccgtatccaataaccgtcttcacttcaatcaaagatggcttgcctgaagcttttgctgtttcgatagcagcatggatggcttccaagtctgttccattttcaaccaaggcagtatgccaaccgtaggcattgtaacggtcacgaacactttctgtaaaggaatcctttgtctcaccatccaagttgatatcatttgaatcataaagaacaaccaacttatcaagtttttgcaagcctgcgtatgaagctgcctcgcttgagacaccttccatcaagtctccgtctccacagataacgtaagtatagtggtcaaagatattgtaaccttcacggttatatttggctgccaagaaacgttctgcttgggcaaaaccagtagcagttgaaatcccttgccctagaggacctgtcgtagcatcaatccctgccgtatgaccaaattctgggtgacctggtgtttttgaaccccattgacggaaactcttaatctcatccatgctgacatcttcaaaaccagaaaggtgaagaagagcataaaggagcattgaaccatgacctgctgaaagaataaagcggtcgcggttaatccagtttggttgagctggattgatatgaagttgttttgtaaagaggctgtaagccatcggagccgctcccataaccacacctggatgacctgagttggctttattaatggcgtcaatacctagaaaacgaattgcattaacagatagatttgacatagaatttcctttctatttgaggtgattattgaatcacacattctattttactattatatgaaaattatccgtatcatgcaacatacggataacctccaaagaatatttttatattatagcaaagctttaaattgaatgttagagtcttgttcaaaacaatcatcaaaaccacgtggatgatggtattctactaagtgttgatcttgaggataagtgtacttaccgccaacttcccagataaatggatggaaatcgtattgcaagcgatcttttcgcattttccaaagttctagaatctcattagtagaagccatgaagttagaccagatatcatagtgaactgggataatgactttggtacgcagattttctgccatacgaagaaggtcgatagatgtcattttgtcttggatacctaccggattttcaccatagttattcaaagcaacatcaattttaaagtctttaccatgttttgcaaaatagtttgagaagtgagaatctgcaccatgatagatggttccacctggtgtttcaaagatatagttaacagccttttgagccatttcttcatctgtaacagccaagccagcaagttcaccgcctgtctcatcagcaccgttcactgggagagttaccaagcaagtacggtcaaatgattctactgcatgaatcttcatatcttttaattcgatagtgtcacctggtttaacaacgatgatacgttcttttggaacaccccatccttcccagattcgtccacagtggtaaggaccgataaacttaacatgctctaacttaggattattgagaattgctgcagctgtgtatgggtcgatatgatcactgtggaagtgtgaaactaagtaatagtctagttcgttgatagcaaatggatcgataaccattggctgaacacgcaagtttggttgcagcttacgaacacctgccatatttgccatttggtgcccacgaaccatatctttcacttttttggttgattttccacggtttgaccaaaggtccatgacaacgttagcaccagctggtgtcttaatccaagtaccacagttgcctagccaccacatggcaaagttgccttcaggtacgacttcttcttcgatttcttcgttcaaccatgttccccactctgggaaagtggctaaaatccatgactctcttgtaatttctttgacgtttggcatatgttgcctcctttggatataattgttatctttgagattagtataccacccttcaaaacactaaaaaagaccaagaaaaacacaggtttgtgttcatcattggactgtccttcaaatatcttccaaaaaagcttgaactactatttcttgatttataagtgtttgaacctcttcttggaacttactagccaacttgctgtctacaatataagacgaaataagactagaaagattttcactgaaacttttgctcttattacgaaatatattgtgtttaagatagtctagcattttcaaaatatcttctgcttcaaggataggattaacccttaaaatcggaaatctgctatccaaatcatcattagtagtaatcactacatcaacttgtgcaatatcttccacactcttaaattgttctgttgtaaatacagtgtcaatttgctcatttggaaaataaagtttgcattgtttcagcaaaagtctcgaaaccgcaacaccttcatcacaaacgagataaacttttttcatatttttttgagatgatggtgtatattttaaaaatcctccaatatgaatcgtcaaataggcaatatcatcgtctgttagccgaataaaccatgctccttctaaaatttccgcagattttctagtgactaaaaataattctccatacttggatcgaatttgttttgttagaggatttttagaaaaaataccgtaagtctttctaaataacaaggctttacagtggatcatcaaatttcgtaacaaatcatccttgttctcaatctccattcggatttgtgattcaaaataccagataaattcttctaaagcaagttttaattgccgaaaatcatcactttctgcatgaatatccaaatctttacgataggagaggaggagaacagctacaagagaaacttcaagtcctgacaaagaaatttcaaacttttgaaacaaccgttctcctaatttcttagacacctgatactctattctttttcttatcaaagaaaattctttctctatatcctgatgtctttcttgatactgttcaacattatgacagcttaacagcaaataaggtagaacctgcaacataaaagttatttcatgatggtttattttcttccctaaatcttgttcaactaaaggaacctgttccttaaaaaattggttcatttcaacagaaagcaaacactcatcatctaacctctctttcatcttatcttctaaaatagatacaaaagtggcattttcttccataaaaatatgatatagaagcgattgaagatactgaattttattaagagggtgggcatgaaggttgtatccctgtgacttgctcacttgcaagatcacctgatattgttccaaagttagttgataacgaatactattcaaatcattgagaacagtattcctagatacctctgttaactctatcaatttttcaatcgtaatacgttctttagaaatacctatccatagtaacattatcatcatacgttcatgcgcactcatgatataatcgtacgaatctacttccgataatagtttacaacaagcatctctctgctcttccgttaagtgaataccaattcgtggaatactaatgatgtgaagcgcctcgtcacccagagcagcattgattttgtcaatgtgataataaattttccttcttgactctttcaaatctttcgaaatcgccataatcgttttggacgtttcttgatccatcaaatattgaagcaaatcacaacttgccttatccagtaccatattaaaaaatcccccaaatctattgatatcacagcaattctttttattttaccatatatatatcaagcgctatttctaaaaaatcttttaaaattacttcaactccaactttactctcaataaaaatcaaatgtaaaaagaggagctaaatttatctttttctcctccttcatcgttcttacttttgaccataataagcatttggtccatgtttacgttggtagtgtttttctagtatgtactggggagcaggtccaactcttggattgatttgttctgtaaagcgattcatctttgatacttcctctagtacgacagagtgataaacagcattctctggatttttgccccaggtgaatggaccgtgattgcgtacaacaattcctggtacttcaaccgggttaagtccgcgatgttcaaactcttctacgataaccaggccagtatctttttcataggccacttctacttcgtccttggtcaaactacgggcgcaagggattgaaccgtagaaataatctgcatgggttgttccgtagaaaggaatatcacgacctgcctgagcccaaccaacagcttctgtcgaatgggtgtgaaccacactaccaatttctgaccaagtcttatataattgcacatgagttgggaggtcggaagatggtcttaaatccccttctaggatcttaccatctagatcagtcactaccatgttttcaggtgtcaattcgtcataatccacgcctgatggtttgataacaatgacaccgagttcgcgattaacttcagatacattcccccaggtaaatttgacaagtccatgttttggcaatgattgattggcatcacagactcgtttacgcatagcattgattacttgattcatcttacatcaaacctgctttcttaatgagtggatagagaaaagcttgcgcctcttgaatggctgcgcgtgtttcttctactgtttcacaattttcagaccacatttcgattaggaaaggtccattataattggtttcctttaaaatatcgaaagcttcttcccatttgacacaaccttgcccgaaaggtacatctcggaactggccctttgaactttctgtcactgcataagtatccttgagatggagagctgcgatggcatgatgaccaagataaaactcactatagatatcattatgccatgcagacacattaccaatatctggatatacaaagaggaagggagagtcaatctctttttctatagccaaatatttttcgatgctactgatgaaaggatcatccataatttcaatagcaagtaccacctgagcttcttcagcccagtcacaggcttttctcaaatttttgataaaacgttggcgtgtctggggtgacttttcctcatagtaaacatcgtaaccagctaattgaatcgtacgaactcccaagtcttgagctaattcgatacattttttcatgagttctagagatttttcctctagaactggatcttttgaacccaatgggtagcgacgatggcctgaaaaacagatagaaggaatacgaacaccagtttcatagattgctttgacaacttccaagcgttcttccttactccagtcaagtcttgctaaacgctcgtcacgttcgtcaatagacatctcgacaaaatcaaagcctaactccttggcaaaatttaaacgttctagccaagtacagtgtgttggggttgccttttcataaattccaattggacgtaccatgatttacccccaaattcgtttgatttcatccttgaaggcacgcgctgctcctgctggatccacagcctctgtaattccacgacctgcgataaaggtaaagacatcaataccttcaaagagtttgagagtatctacatctagaccacctgttacagatacacggaagcccatgtcaatgagttttttaaccttattaaggtctttttcaccccaagtttcaccagcaagaagagcatcacgagattggtgataaatagcttgtgagatacctgcatctagccaaagctgagcttgttcaaaagtccaatcgccataaagctcgatctggatttcgcctcgttctcctcgttcagtcttgatagcctttagagctgcttccatagtagggatggttgcacaacagatacaagtcatccagtctgctccacgaaccgcattatttttagcaactgttccaccagcatcagcacattttgtgtctgccacaataatcttatctgggaaaaggctacgcaagacttcagccagttcacttccaacttgaagcaagcaaacagttccagcttcgataatatctacttcctgaccaacagaaacagctgctttaatcgctccttgcaagtctgaatggtctaatgcaacttgtaaattaggtattctttttgtcatttctttattcctctttctaactttccaaatccaatccttcgagataagggctatccttagattcttcaatcatagccaagacatcttctttagtctggcaagcctgtaaacgtgcaatagaatcttctaattcaaatagggcaataatttgtggaatggctacacttgtgtgaatttttgaacttgttgctgctagtgccaacaaaacagatacctctttcccatctgaaaatacaacaggattttgtaaggtaatcaatgaaaaggcatcactttgcacacctgcttcaggtctagcgtggggcatagccatacctggcatcaagatatagtaaggcccatactcttcagtcgattcaatgatagcatcgtaatactctggcaaaattgccccactttcaattaagggatctactgctaccttgactgcttctttccaattgttagcctctaaacctagtcggatcgagtcattgtcaattaaagcttgttttaaattcatatctgcctcctttatttaaagagggagaaggacagaaacgataactctcagtttctgtccagccccctccaaccttttactgtagtgcttgactgagtttttcggtgatttctttatcatccatcaagttatcaagcccaattaacttcccattagttcgcccttccaattcttgaatcaaatgaagagaagcgattacgatgtcatatcctactgctaaacctttagcttcaccgacactgcatgaattgactgtaaaatctgtttgattaagcttacggagagcattttcaaccttcatcttgataaccattgatgaacccattccatttccgcacgctgctaatactttaaccattttatttctccttttctagatactaagcttcttcttgaacttcaccgttgtaatatttctctttatcttttgctttggcaaattgaagttgaggaataacaagcaagaagagacacacaagtacataaccaacaataccaaggtatttgaagatatatccaaatccaagccatgggaattcaaagtcgatatttccatggtagccaccataagatgccaaatcgagaagggccacacaaagagctcctagagcaacttgaaggacacctgatataaaggaaaggataacagccgctttccatccgccgcgtttatcagcgtagaccgcaatggctgcattgtcaaagaacactggtacaaatcctgtaataataagaatcggatttttaaagacgatgagcaaaacaattgtaatcaattgaccaatcaaaccaaaggtaaatcctgacaagacagcatttggagaaccaaatccataagaagctgcaacgtcaaccgctgggaatgaacctggcaacaatttgtttgaaataccttggaaggcgtttgtcaactcagatacgaacattcggacaccttgcatcaaaacgaacaagtaaactgagaaggtaaaggctgtttggataatgtacataaagaaatcttgtttagcaggattgaatagagttcctgaagtgatgacttctttattagacataatgtctggacccaagattaaaagaatggctccgaagaatacgagcatcaaggtagcagatgcaacaactgtatcgtggaagattgagaggaacttaggtaatttaagattgtctaaactttcttctttcttaccaaagcgtcctgctactttatctacaaaccagattgcaaattgctgttggtgaccaatcgcaaatccgccaccaccagtcaagcgttgagttgcctcaacagtcatatttgaactaactgcccagtaaagtccacagatgataccaatcgctgctgtaccgtaagcattgcgcaattgtggtactaagaatagaaccataagagatactgttgcagcttgttgtaccatgatgtgaccagtaataaagagggttcttaccttcgtaatctttcgaagagctacgagcaagatatttattccaaaaccaatcaatagagctgtagttgcagttccaacaaaatctggaaactctgctacaattttgttgtttgctgcagcaagtccaaagtaagggtcgataaccgctgcaccaatttggaatttgtagttaagagctgctaagattggacgaaaggttgtaaccaaaccaccagcacccacgttaagcaacatataccctactgttgctttaacaaaccctgaaaaaacgtcatgggcaggttttttcaaaagtgcatatcctatcaacaccaataaacctacgaaaaatgcgggattctgcaaaatattgctagaaaaccaatttagaacacttgaaacgacttccataattgttctccttttgaattgtttttgtaagtttattatataatgcgaaagcgcaaacaaaaagaccaagaattacacagcggactgttcactcttggactgtatgatttatgatgttttacaaattatcttattttctcgtagctagataatagggaagaattttagaataagacttcaataagccttctacgatttcttcttcagacgaattttctgtcataggaacatctaccttcactaaaacttttcgaacttcttgacttctcaccttctcgcgtaaagtacgacgcttttcttcattcgcctcccaccgttgactttgaccattagagtaggttagataataaatccctttaacggttggaatgtctaaaactttggcctgcttgcccagtgtttgctcatccttcttacgttcgatgaaactgacttccaaagaaattccaaagtcagtagatgtcccatacaaacgtaaggccatcataggttctgtcacttgtccgtctctctgtagataaacccaaaaatgtggtctcaaacgctgggcctgattcatccactggctagtctgttggagttgccattctggatggcttgcttgaaaggctttggccagttctgtaaaaacctttcgggcctcttgtcctttgtggcggaatgccagcatcttctctcgctctgctcccgctttatcaggattacggtactgcaaaccagcaaagtctaaatagtctcttatcttattcaacatcagtttaacctcctctaactagcaaaaaatcaggataaacctgattttacttattctgtatctacaacaacatagcgatttggctcatcaccttcagagtaactagtcacgccatccatacgtgaaataatacgatggataatcttgcgttcgctatttgacattggatctgttttatgactgcgcccttcttccaaaacacgagtcgccaatttttgcgcataggtctgcaagacttctgcacggtgttcgacataatcattgacattgattgtaacgtagaaggttctggaatagcggttgtaaagataattttgagccaacagttgcaaggccttcaagactttaccatggtagccgataatacgacctggttcgttggtgtcaatttgtagattgatgctacgacggttataatcatttgaaagtgtagcctcaacatccatgtcatcaataatcgtttgaacataagccattacttccgtagctacttgttcaatatcaaagttcgtttcaactttcaagcccaagtcttctagttcttgactttcagcttggtcttgctcagtttcaaggtcatcagcgcctgcttcttccctcatcgcttcctcgatttgaagttcatttaaaatctcaatgtgaccagtttcttctaagatagtgctggcatgtctttcatgttttaagatttcagccttgacttcatcagaaataccttgaccttcttcctctatttttttaatagcatcaaccacatgaccaaggtcaacggtttcttcactaaccgtcttcacaggctcgttcaaatcattgatttttttcggaacgccttttactacctgttgatttgctttgacaacagtcgtttcactaatcgcttcaatatccacttgggctggttttttaccaaatagaccaagaaagccttttttctccctagaaatgactttgatatgagccttcattcttggaatatctaattctttcaatcctttctggattgcttcttcaacagttgaacctgtaaatactaccactaccagattcctccttatttatttcgttttctgagcctttttcttggcttttctttttctattttccaaatctttttgtgcctgtactacggcctcgcgctctgcgataatcttgaatggattattcaagaaataggtttgcaagacttgataagcattagacactgtccagtatagggcgactccacctggcgcataaactgcaaagataaaaatcaagactggaatcccatacatcatcgcagtcgtagcgccatttcgctcagacaaagctttgttggacaaccaagtacttaaaaaggtgaatactgctgctaaaatcggaagaacaagggttgtatccacactaccaaggttaatccataagaaatgacctgtctttaaaaagtcaactcttgatagggcttggaacagggccaaaataaccggcatctgaatcaaaatcggccaaagagagtctgactgtctgacacccatttctttaaatactttacgcatttcctgctctagtttggttctgctttccatatctcgacctggatattgttctcgaagcgccttaatgcgtggctgagcttcctgcattttcctagaagccaccatttgcacctgaaagactggcaagaggactgtacgaatcaagaccgtaaagagaataatccccactccgatactaatatcaaacgataaaaagcgaatgatttccgcaaagaagtaaaccaatttactccaaaaatcagccgattcggctgtaatatcgctagttaccccattagtcgcacaggctgtcatgattaacagagacagtcctagcaaactagtcaactttagtttctttttcactcccatttccttcccggtaaatctttgataattttaatacatggagtagatttttctccatctctgcgtatcccaaggtttcgactccttttcgagcaatgacaacaaagtcgacatcttctaccagactcccttttgcattctggataatatgccgaatccgtcgcttaatttgatttctagtgacggcattccccagttttttgctaactgatagacctactcgaaaacggtttttctggttttctaattggtagaccacaaatttgcgattagcaaaacttgtcccctccttgaaaatcgccttaaaatctttctctctttttacacgaaagtttttcttcaaaactcaactccatctattaaattactactattataccatatttttcaaaaaagccaatcatagcaaggttttggacaatttcatcagaaaaagaagctggaaaaataactttcccaactccttgtattgaatatttttttagtttcacttattttttcaagcgttcaacgtcacgggcaatgactaattcttcatctgttggaataaccaagacacggattttagctgcctctgttgagatgtctcctgtaacgccaaagacattcttttcatcatcaacatcacaaccaaaccacgaaatccctgagattacatcacgacggaaactctctgcattttcaccgacacctgctgtgaaaacaatggcatctgctccatttagcactgcaaggtactgaccgatatgtttttggatacggtcaacatacatttcataagccaagctagcctcgtgattcccttctgctacagctgcttctatatcgcgcatatcgctagaattagcagaaactcccaaaagacctgattcacggttaagaacacgactgatatcttctggtgtgttaaaatcctctgtatattgcattaaataaggaatgatagctggatcaatatcccctgtacgcgttcccatcataataccaccaagaggagtgaaccccatagaagtgtctacagatttgccggctttcacagctgtaattgagcctccgttaccaatatgacaggtaattaacttcaagtcttctaatggacgtcccaagagttttgcagcttctcctgctacaaactggtgacttgtaccatgagcaccgtatttacgaaccttgttttctgtgtaatattttgttggtagagggtagcgataagctttctctggcatacttgtgtggaaggaagtatcaaaaacaactacactggtaatgtctggcaacaattccttgaaggcacgaacacctgctgcattggccgggttgtgtagaggagccaacaaactcaactcttcaactttttctaaaacatctccctcaacaactgttgattctttgaaatattctccaccagcaacaacacgatgtccaacacctgtaatctcgtcataagccttgataatatcgaaacgaatcaagtcatccaataaaattttaacggcttgtatatgattttcaatatccaaaatttgttgttcagaacggccgtcaaattttacagttgaaattgaatctttcaaaccgatacgttcaatcaaacctttcgccaatactttttcttctggcattaagtataattgccatttcaaacttgaacttcctgcattgattgcaattgtttttgtcataacatgatacccctttttaagcgttttcaactattataacaaaatctattttatatttcagtaccttgagtccatttttgaaaattttctttaaatttcattaaaacacttgcatcttgcaagctagcaagtggataaacaaaaggctctactgctatttcatttttcttctgtaagataaaaatagtcttagattgtttggcattagcaaagagattttcaggcagactaatcatagcaaccagactcgcctcttctttcagccattcttttaacaaatcactttgaggactggtcaacaaatcactcggagctagaaaaatagcgtatccgtctgacttgaggtacttaagcccttgttccatgagcaagtgatgggcgtaagtatgttcttggctagaagcaacttgatggcgcgacgcaacggcatcatcaggataatagccgacaggcaagtcactgatgaccacatcgctttctttgagcatttgtgggcgaacggcatctccttggacaaagccagcctgcaaaccaattacatctgccatgctagctgccagatcaatcagcaaatcatccacttccattcccaagtaatccacctttttagtaagcgaggtcaagaaaatagcgcctagaattcccatcccagaacccatttcgaggatagtaatttcctcctctttaaacaactcttccacaataaacaccaaaagcaaagcaatagcatccggtgtaaactggtgattggcctgcaagggttctgtttgcccagccttcatcaagagaaactggtaggtcttgagccattcttctttgcgtagtgctaaacgcttaagggtttgattgttctccttgacctggtttagctcagtttcaccatccagatagatgctattttgctccaccaaggcgtcataaaagttggtcgccaaatcactttggatgacttggacattctctagtaaataggtataagcttgttcaattttttcaaaatccatattcctatcttaccaaatttcccttcttttttccatccttatagaaaaatcactccctgactaggcgagtgatttttgggctactattaaaaagaattctgagtgatttccttgaaacaggtcttcagcactatagagaatctgactatgcacagatgaaaaaccatgctcaattagcttgttttccagttcagctaaatcaaatccatgatgattagcttctgtcttggtaaaatcagcaatgatgagtttcccatcttccttcaaatgttgatgaaacagtgagagagccgcatccaaatcaggcatatgatgaagaacccgactaacagcaaggcaatcaaactctttctccaagggatttttcggtaaatcttgctccaaaaactggatattcttgattgcttgctgctccactttcaaacgagcttgctccaacattttctcagaaatgtctacaagagtgactgacttagcctgcttggctaggggttaggggcaaggctaatagacccgtgccaccaccgaaatctaaaatttctttgtctgatagaagatcaatctgtttctcggctgcttgacataccaagtttgcgaggaagatatttttaggggaatcgaaagtttctgctttgtggttaaaatcatgtttcatatctttaatttagcacaaagtatagtaaactgaaataagatataaacaaatgaattggagcttaacatccatttccagcaattttctagaaactacagtggactattctggattcaacgcattatagttgaattgactatgaattctctttcttttcaggcttctcttctgattttttcttctccactttttcgcttgaatcggtcgctacctcttcctttttatctcttttctcttctttgattttgactgaaggaaacagaaactcatattggctcttatccgtacgaaccctcgtcactaagccagttttcttgttttgatagcttacctgacctagattaaaaaactgttccccactttcttgctcaaccttatctttggttcgtttagccatagcaaaagcaaccaatttttctttattcaaagcatagtcttgatagtgggcgacttgtcggttcaaataaaattgcaacaaaagactaaagatggctgctatggtgactgcgtagaggagaacacctgccttaacttttttctttttccacacgatagatgaactccctttctaagcctttttggaactggaaatgaaagcgaaccagttgattgtcctctgtaatccgtacagatttgagtccataaaccataggctgataacctcgaccacgagcattcgttttacggaaatcatctgactttgacttaccgatggcgatgtccttgccatcttgcttcatgtataggcgattgccttctactttttcgaactgcgaacggtctaattctacctcaagttggtccacaaacaagagccactccttttgctcgctttgttgctggtagcgaacttctgaaatgaggagctgactcatagcttgaaaaaggagtaatcccccactgatgacaatgagggcaagcagggattctaacaaggtaaaagccttgaccttatggctctttgattgccaacaactgttctgaaccatggtagacctccaatcctttttcactagaaaatacctgaatctcaactccgttgatgcttacctgattttgccccgtctgcagggccatcttagctaccctcaagacttcttccttttgcaagatttttgcttcctcttgcctatttttttgaatttgtcccaaaaggagggtcgcaatgctggcaaagatagctagagcgactactgcttccagtaaaatcactgccctaattttttgtttccttaatgcgtttaatttttccatttcctagatataattgatagcgaatcgctcctttactggtctgaaattcaaccttagccagggacgaattgcccccagctcggtcaaatgtaatactttggcctgatggggcctgaattcctttagggactggcaacttttgactgccattgctaagcgtctgcccatctaagttcagactagtcttttgctgactggctacactgcgtttttgggtttcccgatagagttcttcaaactccataaagaaaatctgttcctctaccgctgaaaaagtggactggacagagccggacaagcccaaggcaaggatactcacaagtcccaaaaccaagagactttccagcatggtaaaggccttaatcattgactttacgatttgctcctccatttttatcattgtattctttataagctttagcctgttcttccgtgatgcgtccatctgcttgtaactttcttaggctagcatcttcattcttttctaagctataaagttctgcctggctttccaccaccttaacaacagctgcttttcctttgtcattgactgcttctttttgcttggtcagattaggtacaaagagcaagaaaagcacgctgataatcagcaagaccaccaacatctccaccaatgtaaaagctttaaccttagcttttttcaagaatgtcatcatttttttcattttaaaaatttacctccatattttgatacatgggcatgagcattgccgcataaagtaaaacgataatcagtgccacaaagataaaaaccagtggctgcaccaaattcatggtgcggttgactcgggtaaaaaaggcttcccaagttttttcagcatagatttccaactcactacccagcttggacttaacttccccatactctatgatgagactcaattccttcctaaagaaaggataggttcctatcgtctgagaaaattcacggccatttttcagggtttgagccagatcttgaccgacttctttaaagagctgggaaccttgttcctgcatcatttgaaaaatctgcgtcaactccattccctgtgaaatcatattcccccattcacgtgcataataggctgtcaagtaggtctgcacaaagattccaataaagggaaggcgtgctaagatagaaaagacactcatcttagaacttcttttataaaaagtgagtgctaaaagggcaagcacggaaacaagccctaccatgcctagaaaaatttggggcagattaccgataatttgggtggcaatattgctactatccagttgtgggagcaggtaattccgtagccccagcataattaagagaagaaaacccagcaaaatcaagggataggtcgctacttcaatcaattttttcttgaccttagccagattgtccagatattcttctatctttcccaaactcaggtggagattgccatgaacttcagctagggataactgagtgacaatagcacttgaacatcccaaactttccatcatttctgagaatgatttcccctgagacaagcccacacgcatctgggtcacacactgcttgtccaacaaagcactcctatctaaaaaggagatagtctccaccagatgaaaaccgctagaaaagagattgttaaatagggtgatgatatttttttgcttagctgtagctaattttttccgtctcagcctgaagacttgtgatatgtccatctttaagaagctggtcaatttgctcattccacttggctgcttggtgttcttgataatctctgcttgcaaagtcaacgattcctcctcccccgattaatctctggtagcagactccttgcagaacaactgccaattcttcttcactcacacccaactccagcagacgctcataaacacctcggatactcttggcgtgaatggttgaaaagactgtcgcacctgtcaaactagctctgaccactgcacgcgccgtctcgctgtcacgaatttctccgataatcaagagatctggtcgatgacgcaaggaaagtttgattagattttcataggttaggccgattgcttcgttcaactgcaactgaagcatgtcgtcctgcttgatttcgacaggatcttcgatggacataacttgctgtcctttaaagagtgacttggacaattcatgcatcaaggtcgtcttaccactcccaaccggaccagcaaaaagatagagtccccgttgcctgtactgcttgcctaattcttcaatatcctgaaaccaaaaatgcaggtcctgctcctcatcgtgcaacaaacggataaccaaactctcatgcccccgataatcgcctacagtagataaacgtagagacgctatcttatggtcataggcataatcacaggaacccagttgactacgtcttttttctcccacattcatacccgccacaaacttaaagtgactgataacggctgcaaacttttcaaaatcatagctaccaattttacagcgctcgtctcctaccctcatatgaagctcataggcgtctaacttagggacaaaatagatatcctgcgtcccttttttccgagctgaacgaatgatttcttgtgcaatttcttgaaccatacttacctcctcacctatactattcgcaaagagttagaaaaataaaaaaagcaactccaaaaaagttacttttctctattttaatttcatacggcaagaacgattcctttcctgactggtttgtttttcatagcctgagcgtagtttttcgtctgggataacctgctcatcctgcaaaagagccaaagaatggtattgttgtaaatactcatcacattcatcacaccagcgttggtcttccgggtcccaaaaaatggtcatcaagtcgcttctacttttataaagaggcgattcttgttccaatctaaaccagcaagttttgtagtatttgagagcatcataatactggtcaaattttctacttgctacaatatcttcttcccaaccttctaagaaccaccacggttcaaaatctccgtacatttctataacacgatacatattcattcattcctttgtaccgtatattataaccaattccgccagacaaggaaagaaatatgctcatttcttaattttttgataaaaaatccagccatctgatggatgactgaatttctatttacttatgtacaaaaatatttttactacttaggcttctgagatatcgttttcgataatgaccttaatggcatggtggtctgctgccttactgaagacttcgtaggctttttcaatttcactgagtttgaaatagtgagttaccaatttttccggttcaatcttatgactttcaagtgctttcaacaattgtggagtcgtatttgtagataccaaaccagttgttacattgatgttgcgaatccaaagtttatctaaatcgaattcaactggtttaccatgcacaccacagttggcaaccgttccgtctacaccgataatcttttgacagaaatcaaatgttgcaggaataccaacagcttcgatagcgacatccacaccacgaccatctgtcaaatcataaatttctttaatggctttttcagggtctgaagaattaaccttatgagtcgcaccgaatgatagggcagtttccaagcggttatcgtctaggtctaccataatcaatttagctggtgaatagaattgggctgttaaaagagcagccaatccaactggacctgaaccaataatggctacgctgcaaccaggttctactttcccttttaagacaccaatttcatatccagtaggcagaatgtctgacagcataaccaaagcttcatctgacaagtcttctggagtatggtaaagagtattatctgcatgagggacacgtagatattcagcctgcataccatcaatcaagtgaccgaaaatccagcccccttcgtcttcacagtgagcataaattccttttttacagtagtagcatttaccacaggcacagacgcaagaaatcaagaccttgtcaccttttttgaagttggaaactccttccccaacttcttcaacaatcccaatcccttcgtggccaagaatggtaccactttggcaagtaggaacatcccctttgataatatggaggtctgttccacaaatagtggtttttacaatacgcacaatagcgtctgttggcttgcgaataactggtttgtctacatcaacaaaagaagcaagtcctggtttaacataagtataggctttcataaagcactcctccgtttttttatttgtaatatttatagttcaattgtaagcctttttctttgtttcttcaagctttttttgtgatttttttaactttttatttaccagtaaagtaccctgcataaaaaagcagaagttagtctctaacttctgctttctctcttatgcttgataacgttttacgccatctaggtaggttgctaccaattccaaatctttatctaatacgatgaagtcagcgtcgtagccttcacggatttggccacagacgtcatcgatgtgaacggatttagctgggttgaagctggccatcatgactgcttcatgcggattcgcaattccccattcgaccacattcttcaaaccatctttgagtttgaggatagaacctgccaagttacctgtcgatttgaggcgtgcagttccatttgcaacgacaactgggaattctcccaacatataatctccgtcttccaatcccccagctgtcatacagtctgtgataagagcgatgttttctgttcctttttgtttgataagaatttcgcaagcctttggatctacgtggtgaccatcacagatcaactctgcataggtatgtggcaattggtacatggctccaaccatccccaattcacggtgagtcaacccacgcattccattgtaggcatgcacccaaacactcgctccagcatcgattgcttttttggcttcatcaaaagtcgcgtttgaatgtccaagagcaaccgtcacaccttcgcccgtaactgtacgaacaaagtcttccaccccatcacgttctggtgcaagggcaattttattaagcaagccatttgccgctttttgccaagaatgaaactcctcaacacccgggtctctcatataagttggattttgtgcccccttaaaagtttctgtgaaatatggaccttcataataaatcccacgaatcttagcacctgttgcttctttataatggtttccaagattttcagtgactgcaagcaattgctcataagtggctgttaaagttgtgggtaagaaactggtaacaccggtactaagaagtccttcactcatagtatgcaatgtaccttcaatgttgttgtccatcacatctacacctgcatatccatgaatatgagtatccacaagacctggggcaatgctataacctgtatagtcaatcacctcagccccttcaggaatctgctctacatgtttcccaaacttgccgtccacaagttccaagtaaccacctcgacgaactccgtgtgggtagaaaaactgatccgctttaatatagttaggcataatgttaacctccttaaaagattgattctacaatttattatgtcaattacattataaacctttcttttttatttgtaaatggtatagacctattttttggagatattttaaaagagctggatttctccaactcttctcttttttaatacaagttattttgatttaaccggcttgtcttgagctgtctgcaaagctgtggcaatcgtatctgcatacaattttgctcctgcttcgatagtgctactctcactcccgaaatgaacctggtctgttccagcccaaatttctggatgctctttcgcaacttgattccaatctgctatcgtaatgtaaggtgtcttctctgccaattctctcatataggcagcagccttctcaacgatggcataggtctcttttgtcttatctccctcataaggagtcaccaaaatcatatggtgtcccttaggaagatttttcacgatactgtcccagtcatccttgtaattctcaggattatttaccccagtcgcaatgaccaccgtcttaggtaaaaatttattctggctattatttagcatgatttcatttgcggtcttggttgttacgctgacctgcgcgttaatctgtgctccaggaagagctgtctgtagtgctgtatttgcccttaaagccactgagtcaccaattaacatagtgccatcagcaattcccaaactgtttgcatctgcccgttctgccatcaccttggtctggccaatatttgttgcagcttgcttcaagccattgacagtcaagtctgtctcaaacgctcccacttgtggtgccaacaaggtcaccgtgcagacaatgatggtcaagattcctgtacctgctgcaagaattgcgtgaatataaggcaggggacgaagggtttggacaataggtgtgttcttgcctgcaatccaaggttccaatacataaaatgacagactggcaaagccataagaacaaatcagagtcagtaatacagcaagaagatttgatgtcaactgtgagaaaatgatatagaaaggccaatggaaaagataaaccgcatagctagtatccgctaaaaagctgataatcttcgactcctgtatatgatgtgtcttttcatgtaagacacgcgccgccagaatcatggcaagagctgcaagactggcaagtaagaagccgataagataggcaaaaagataagtgaatttgacaaagaaagtcaaaagaactaggaaaccaaagcctcctccaaaaactaccaaagtctttcgtaaatcccagattttatccaactgcttgacgagggaagtcgtctgacgaacgcctacaatagttgctaacatacttcctaaaaagaatggatagacatgagttaaactggagaaataaacagaggaataagaggtcactagaaaactaccaataaacatggagaagaaactgatcaagaaggcaacagcagataagagaaagaccatccccttcaactgaccatttgatttagcttgtttggataagaaccaaactgccaatccccaaagaatatagtagtgaacctcaactgccaaactccaattatgaacaaacaaatgaggaatgaactgagattcataactcccacctgttaggagttcatagaagttggtcataaagcctaagacgcccgcaatctggccaccaattccagcaacatagtcttggcgaaccaagaaagtaaaaggcatggtcaccaagaccatcaaaaccacaggtggcacaatccgataaaagcgtcttctaaaaaatcctatcaaatcaatctcattgttcttagaaaattcttcaatgagtagagctgtaatcaggaaacctgaaaatgtgaaaaagacatctaccccgaaaaatcctccaggaaagatcgtctgaaagaagtgatacaagagtaccaaaagtaaacctataatcctaatcaaggaaaaccatttaatgcgcatacgagtttattcttcctttcattgtacactttattctatcaaaaaaagaagaaaaatcctaagagaaaacttaggatttttttatatcaattccattttagaaattacgtcctgacttattatagccatatttttccacaaaatactcacggaattccaagagattgtcatccatgatggcttgtcgcacttgcttcatcaggttaagcaagaagtaaagattgtggtagctagtcaagcggataccaaaggtttcatcagccttgagcaggtgacgaaggtaagcgcgtgtatagttattacatgtgtagcaatcacactcaggatccagtggcgtaaagtcctcagcaaactgggcatttttcacaaccaaacgtccttgactggtcatacaagtcccgttacgagcaattcgagtcggtaagacacagtcaaacatatccaccccacgaatgaccccatcgatcaagctatctggcgctcccacacccatcagataacgaggtttattttcaggcagcagttgagttgtaaagtccaagaccgcattcatctcttcatgggtttctcccactgccaaaccaccgatagagtagcctgagaaatccatgctgacaagatcatgagctgattggcggcgaaggtcttcaaatcctgcaccttgcacaattccaaacaaaccttggtcatgtggacgacggtgagccttcaaaccacgctcagcccaacggctggtacgctcgatcgatttcttaacgtagtcataaggttgataaaactgaggacattcatcaaaggacatcatgatgtctgaacccagattattctgaatagagatggctttttctggggataggaacatcttagaaccatttagatgatttttaaaggttactccttcttctgtgatattacggctatctgctaaagaataaacctgaaaaccaccactatctgtcaagataggctggtcccaattcatgaacttgtggagaccaccagcgcgtgcaatgagttcatctccagggcgaagccagagatgataggtgtttgataggataattcccgaacccatctccttcaattcttcaggtgactgagttttgacagtggcttgtgtcccaactggcataaacataggtgtcggaaaggtaccgtggggagtgatgatttctcccagacgagctcctgtgtgtttttctttcttaatcaaacgatatttgattggtgaatctgacattttttacctccgaagctgggaaagacagtcccagttcatacagtgtgcccaaggacacactgtatgattttatcaaaaaaagtaggaactgtcacgaactatgtataagaactatggtataataagagaatgaactatccaaaaattgatttaaaaacaattcgtcaggagtcaaaacattttcaggctgacaccccccgtctctttctcctctatatccttcccagtatgctggtcatcttatctggttttcttaatcccttatctcggatccacgggactgttttagaacagccatttttcagcatacttggccaaatacttcaaacctacctctttcctctactagtctcctttatcgggactattcttttgaccagttccgtctatgcaacactgacactcatgaaagattctaaaacggagccatctgtaaaaaacagcctagctctctttgatgaggagcgcttttctcaaacctttttgaccctacttctcaaacgtttctatctctttttatggagtatccctaatttacttgggatttacctcctcttttatagtagctttttagccaaaaaattcgtcaccctacatcctgagtttccaaatctagatctctcatcagttgaaaccgagcgtttcctcatggtctttggactctactttcttgcaagtctcatcttgatcattgtaggaaatatcctctatattccacagtattatgcctattcacaggtggaatttcttctctgttatagtctagacctaggacaggtcccaccaagacgaatcctaaaaactagccgttcctttatgaagggctacaagttccagcactttgtcctagatttacagcttcttccttggtacttcctcaattggattacctttggcattgctagtttttcactcctaccttatatccaatgcactaaaattatgttttaccgagcagtattggcccgaaaacgtccaaaagcttgaaggtttttcccctcaagcttttttctatcaatgagtttctccgcctaccaacttgagttcctgatctccatgttctattatagcgccgattgctgcttctatccctcgccgaatatccactaaactcatagctggagtagtcggtctgttcaccacctgttccatcatataaggaatatgcataaaacctgccttaacatatggagatttcttttctaccaaatagagagcctgatacatcaaatggctgcagacaaaagtccctgccgtattggaaacagaggccggtaagccctctttttttatagcttgaaccatcgctttaatcggcaaactactaaagtaggccgaagcaccatctgggcgaatgggacggtcaatcggttgattatcttcgttatcagaaatgcatgcatcgtcttgattaatggtcactcgttcaggtgtcaaactagttcttccaccagcttgcccaatacaaaggacaaagtcaggttgataacgattcatctcttcttccaatacttgagcagatttgtgaaaaactgtcggcacctctagccaacggacctcagcaccatggatttcagctggtaaacctttaatggcctccaaagctggattgcccttttcccctccaaagggctcaaaacctgtcactaatactttcatttctaactcctcaaaaccaattcaatgagacttttttcttaaaaacaagtataacatatttcccttattctggattaaaaaggattagcgagattagaatcgaccttcaagtgtatttaaagagtaaaatactaatcaaggccaaaatagctgatccaccttgtttcaaaataatttttttatccgctgttaaagagccgtaagtcgcagcaccaatcacaaataagacaaaaatagtcacaatttctaaattctgtgagaaataaatgacatacaagagaaagactcctagcagagccttataaattccttgatttttgaacaatgaacttactgacggatgagccaattcttccttttccatattaaatacacgactagtcgcatctgattgcgtggcaatactttccaaataaaaaatgtaaaaatgctccaaagcaacgatcgttgttaaaataattgacatctatttctccttaaatttctatattttcaatacccaaaaccaatttatttaataaacggctgagttctgttctctcaaactctgttaagatactttctatctcttccttaaccctgatatgttgcagagggggattcaccactaactgctccttggcatacttcgcagcctctaccaacacttcccgctgattttcaggattacgatgacgctccaccaaaccttccgtttccaaaattttgaaatgccgtgtcaaagcagcctgatcaattttcaaacgctcctgaaccgccatttggttacaaggagaatgctccagcaaaaacagtaaaatctgataccgtgtcaaactaatcccaagccttttttcaaacaattgcgtactcgcttgctcagacaagcggagttgatacagtaaatcttgaatctctagcatttcttcccctctctttttattgatttatcaatatttgactaattaattgtgatataaagtaaaatagattgcaagaatgttgcttaactcattacaagatgataactttccattttccattcaaattgatactcaatgaaaatcaaaaagcaaactaggaagctagtcgcaggttgctcaaagcacagctttgaagtttcagataaaactgacgtggtttgaagagattttcgaagagtatgacaaagaaaaaacgaacgagaatcgctttccatcacgaaagctagatctcattcgtcaaaatgatgttatcaagtcgggtttatccattcattgaaacgtgaacgtgatcatagtgattttctgtcacactaccacggtctggcattgggttccaagtgttagctggcccatatttgctatcgaatggagcatagaaacgttgtttccagatgatgtaactaatgccacggctggccatattttgaatagcatattccgcaatcttatcccctaattctgaacgttctggtaccataaagtcgatagccaaaccttttccgtgatctccactgtctcctggacgataaccactaaaggatgtaatgccaaacaagttagcaatttcttctttaaaggcagctgtttgtggttgaagacctgcattttcagattttgctactgcaagtccagcataatcgggcgcagctggagcctcgtaagttgttgaaattattttcgtctcttctggttgataagtagaaactgctgctgtagctccatttgatgatgctacttcttttgcttctgaacttgttgtagttacttccactgctgatgcagcttgagggcttgcttgtgtttcctgcttctcagctggagtcgtttcctgaggagttgcttcttcaactgggcgagttgtttcggtcgtttgctcctctgggacagaagtgcccgtagatggtgccacttcttcagaagcaatcactgtctttgtaacttctgcaattggttgagaaaggtctgcaacctgaacagtttgatcatcaacggtcacttgattagtggtcaaatctgctgtcgcagttgtcacttcttcactagagtctgcttgaggtgtttggatttcaacttctgttacttcttctgcttcattgacagtcgttgtcaaaacagtttctgggaaaatcaagtccatattagtgattttgttcagattcgcaagcactgtgacatctacacccaaggcttctgcaatggtgctcaaagtatcaccatactgtacggtataacttgttttgttgtccgttttagtcaaatcgttttggatttgctcaacactacgtgcagtccaaagaacttcttctgcttgagttgccaatactggggcaaatgacaaggctactgttgacgctaataacattcttttcttcattctttcaaattcctttcaaatgagtacctgtctatcataacacaaaaaatgtagaaaaaaagccctctcgggcctatttaacagaactgtctattccttgtaacaaactaggttacttgaaatagtttgttaggtctctgtcacaaaactgacacaatctttttatcacttagtctcaaaaatacgggaaatatctgctaacgcttgaatcctgtgattcccttcataagtagactctaaaaagttgatgctttgaatcccactattctgggcaaattccacatccagagtccgatcccctatataataagtattatcagaattcaactgatacttatctagcagataggtagccgcttctggacttggcttccgcacaaagccactctgactggttaaaatctctgtaaaataggattccacccccaagtccttgagaatggtaaaagcgttgttccccttatgagtatatataaactgctgaattcctgattcgtctgcccaagctagcacctcacgcgcacctggcatcaaaactacctgagcattcttctcagccagactctgggcacgcacctgatttagcacctcaacatccagatttctatcttctgccacccgcacaagcaaatcttgcaccgaatacttgaagataaactctctcaccttctccttatcataaggaatagaaaactgagcaaaagtctcctcaatccctgataaaatcgcttcgtaagagtccaataaagtcccgtctaaatcccaaataaaagctgttttttgcatttcctatcctttcaagctcatatagcgctggtaacgatagcgtagaaataaccagcgaaaaccattatccaagagagaccctgcccaaataccaggcaagccccaaccaagcacaatccccatcagatatcctgtcccaatgcggatacaccacattcctatacttgtcgcataaaaagggaggcgtgcatttcctaatccctgccagactgccgtatagatgactgttcctgtcgtcataggggtcccaagtagtgaaaacagtgtcactagaacactagcctccaccgctagagaatcagtcgtatagagatgagttaatggtacacccaagacatatatactaaaggacaggggcaacatgaggaacagagaaagccaaaaggtttgtttactcaaactagcaactcttttccaatcatcctctccaactgctcgggccaacagcatgaccgttgccgtagcgacgccaaaggcaggcatatagttaaactgggtcaagacttctccgattgcattcccagcaactgcctccgtcccaaaagaaacgaccaaggcaatgatcactacatctccagccctcatcataagtcgctctccagctgctggtaaagccaaggtcaacagttccttatctaaaccaaaagttggcttcccataaggcagttttaattgtgaccacaaaatcacaagaccaaccaaacgagacacaattgtcccccaagcaacaccagctatccccatatccagaacaaaaatagctagacttgaaaaaagaatattcaaggcattggataaaaaactaacatagagaggcagacgtggattatgcgttgcacgaatcaaggctcctagactagtcattaaacctaagagaacaatcgatccgcctaccaaagatagatacagtccaccactctcagctacatccctctccgtccccaaaagtcctatcatctctttcccagcgaagatggacaaaaatcctaaaaggaaacttaatagtaaggtaatcttcaacgcctcagtcacatgataggccaacttcgactggtctttctgccctatgctttttgaaataacactggaaatagcagctcccagagcgatgaaaatcgcctgataaatggtgataatattaccagctactgaaacccctgaaatagctatcaatcctaaatgagcaaccaaataactgtccaccattcccattagcatctgcaaaaagttttcacccatagctggcaatgcaatattaagaatgtctttatttttcttaaacaatctctcctcctgatgaaaagaaactcagttggtttcccaaccgagtttgctccctctgtcttaaagtcctaaataagcctcaaccgctgcttgcatgtcagcagctgccactgttgtcttgtgacgaattggagctatttcaagcccatcaactgctggtggcactgcaacgcctgagatttcatgtaattgagccaaggcttcaaagtctgttaaacctgcttttccagttacagcttctactgcaactactgggaacttgtatggactagctgttgaagcaatcactgtcttagttacatctccagtggccgattggtattttttataaactgctgaagcaacagctgtatgagggtcctcgatataagaatctaactcacaaacacgcttgatctctgctgccgtttcttcctcagtcgcatattcagctgcaaagaggtccaaaatctctgcatcaaagtctgtcaacttatattgtccttgcgtgttcaaggcattcataagttcagttgtcttttcagcattatttcccaaaagatggaaaatcaagcgctccaagtttgaagataccaagatatccatagatgggctggttgttaccttaaactcacgttttttgtcatagacacgtgttttaaagaagtctgtcaaaacattgttgtcatttgaagcacagattaatttaccaactggcaaaccaatttgtttggcataaaaggcagccaagatatttccaaagtttcctgttggtactgtgaagttaaccttttcaccagctacaatttcaccagtcttaaccaattgagcgtaagcataaacataataaacaatttgtggcaccagacgaccaatgttcatagagttagctgatgaaaattgcaacttgttggtagtcaatttttcacgaagagccacgtcgttaaacatgtgcttcacatttgtttgcgcatcgtcaaagttaccatcaatagcaataacatgagtattgtcgccagtctgagtggtcatttgtaactcttgaatcttgctgacaccatcctttggataaaagacgataatctcagtaccaggcacattcgcaaaccccgccatagcagctttccccgtgtcaccagatgtcgctgtcaagataacaatcttgttctccaaaccatgtttcttagcagcagtcgtcataaagtatggcaaaatagacaaggccatatccttaaaggcaatcgttgaaccatggaaaagttccaaattgtattgcccatctaatttcactaatggtgcaatagctggagtatcaaatttgctatcgtaggcattgttgatacagtagtccaactcctcaactgtaaagtcatctaaaaatgctgacaaaactagcttagcaacttcctggtaagaagcatctttcaatttgtcaaagttcaaatctacctttggataagtatccggtgtaaacaaaccgccgtccgtcgccaaaccttgcaaaattgcttggctggcagttactgtattgttggcatcacgcgttgattgataaactaatgtcattactctctatcctttatctatagtctcgtccattatatcatgatttttcagaaaattctccctttataagagaaattataggctcaattcttctctcaaaggctgtaaataggtcatttcttccttatttctcaccactagtccctcctcagctagtaggagtaagtctttggaaaattcaataatcgtagtttcttcctcatctgtaagatttttcttagaaaattgtctccttaaagacttgtaatcataaccaaatactttaaagaaaggtgctgtttctaagtaagcttctaacttgtctaaattaaccaataatcccaagtgaaaagctgcagaagcaaaagtcctatcaagtggctgtgtacacacactacgaaactcaactgttcctcgagtcgttaaatcttggtactggtaactacgatgagtttcaaaatccttctcttgggggtaaataataacctcatccccattcagagcaaatgcttggatttcggacgtagccaaatagtccccagcctgaataggataaaaataataggtctgcccatcacgttccgcagtaaaaatcgcagaatgatttagatagtcaaaaaaatcagtttcatcattaaggagtctagcattgaccccaacattctctggatagataccatgcatagattcttcccagaaaatatcccttgaaattttcgtatcccaatccgcacccgaaaattcagagtttgcaaataaataagccttagccgcttcaatttgagtaaaagcattaatcacccgtaagtagttggtttttgaaatatccagctgaacctggctcccacagataaaagtaccatattcagggaaatgatgtaaatctgatttaataatatttctactcaaattcaaataatccatcaacatctgatagcgtggataagccactggacaattctcatttttatcccagttgggatggataccacagccaacaatagcatgatttgattcagctaactttctctgaattacattcatataattattgaaacgattttcgacctcttgaatcgtttcagccttaccaaatgcaaactcaatcgttgtataggaaacttcaaataaaatagcatcctgacttatcggatctactaactggatcagattgccaaaatcatctacctttgctacggtgagatccaaagtagaaactaaataatgaaatagatccttcataacttcaacatctgtagcatccccttctaaacttgcaacaggatactccaactcaattccgacaaacaattcaggattttctttaatatttttcaaataccgatgttttaataaatcgatagaacaagacatactcccctacactttcttaatctaaataaaatttgaataactataattataccaaaaataatataaaaaaggaacgaagaataacaacgttcctaacactatactataccggcggccggggtcgaaccggcacgtccttgcggacactggattttgagtccagcgcgtctgccaattccgccacgccggcaaatagtaactggggtagctggattcgaaccaacgcatgagggagtcaaagtcccttgccttaccgcttggctataccccaatataaaataggcgagtgatggggatcgaacccacgcatgccagagccacaatctggtgtgttaaccacttcaccacacccgccataattctattaacacgggcagtaggaattgaacccacactgaaggttttggagaccttagttctacctttaaactatgcccgtaaaatggaaggggagggattcgaacccccgaacccgaaggagcggatttacagtccgccgcgtttagcctcttcgctacccttccaaaatatataaatggcgcgagacggaatcgaaccgccgacacatggagcttcaatccattgctctaccaactgagctaccgagccttattgcgggagcaggatttgaacctacgaccttcgggttatgagcccgacgagctaccgagctgctccatcccgcgttaatataaaaggaggatgtgggattcgaacccacgcacgcttttacacgcctgacggttttcaagaccgttcccttcagccggacttgggtaatcctccaaaatagtttatacgggaacaagcccgtgtcctcttagtgaacagataatattccaatcccctagtaatggactaaacactatgggcacgagtggactcgaaccaccgacctcacgcttatcaggcgtgcgctctaaccacctgagctacgcgcccaagtcaaaaacttggtacaaagaacaaagttcaaagcgggtgacgagaatcgaactcgcgacaacagcttggaaggctgtagttttaccactaaactacacccgctaaaatgggagttaacgggatcgaaccgctgaccctctgcttgtaaggcagatgctctcccagctgagctaaactccctagagctaagcgacttccctatctcacagggggcaacccccaactacttccggcgttctagggcttaacttctgtgttcggcatgggtacaggtgtatctcctaggctatcgtcacttaactctgagtaatacctactcaaaattgaatatctattcaatttaagaaaaccgttcgctttcatattctcagttactttggataagtcctcgagctattagtattagtccgctacatgtgtcgccacacttccacttctaacctatctacctgatcatctctcagggctcttactgatatataatcatgggaaatctcatcttgaggtgggtttcacacttagatgctttcagcgtttatcccttccctacatagctacccagcgatgcctttggcaagacaactggtacaccagcggtaagtccactctggtcctctcgtactaggagcagatcctctcaaatttcctacgcccgcgacggatagggaccgaactgtctcacgacgttctgaacccagctcgcgtgccgctttaatgggcgaacagcccaacccttgggaccgactacagccccaggatgcgacgagccgacatcgaggtgccaaacctccccgtcgatgtgaactcttgggggagataagcctgttatccccagggtagcttttatccgttgagcgatggcccttccatacggaaccaccggatcactaagcccgactttcgtccctgctcgagttgtagctctcgcagtcaagctcccttatacctttacactctgcgaatgatttccaaccattctgagggaacctttgggcgcctccgttaccttttaggaggcgaccgccccagtcaaactgcccgtcagacactgtctccgatagggatcacctatctgggttagagtggccataacacaagggtagtatcccaacagcgtctccttcgaaactggcgtcccgatctcttagactcctacctatcctgtacatgtggtacagacactcaatatcaaactgcagtaaagctccatggggtctttccgtcctgtcgcgggtaacctgcatcttcacaggtactaaaatttcaccgagtctctcgttgagacagtgcccaaatcattacgcctttcgtgcgggtcggaacttacccgacaaggaatttcgctaccttaggaccgttatagttacggccgccgtttactggggcttcaattcataccttcgcttacgctaagcactcctcttaaccttccagcaccgggcaggcgtcaccccctatacatcatcttacgatttagcagagagctgtgtttttgataaacagttgcttgggcctattcactgcggctgactttaagtcagcaccccttctcccgaagttacggggtcattttgccgagttccttaacgagagttctctcgctcacctgaggctactcgcctcgactacctgtgtcggtttgcggtacgggtagagtatgtttaaacgctagaagcttttcttggcagtgtgacgtcactaacttcgctactaaacttcgctccccatcacagctcaatgttatagaattaagcatttgactcaattcacacctcactgcttagacagactcttccaatcgtctgctttagttagcctactgcgtccctccatcactacatactctagtacaggaatatcaacctgttgtccatcggatacacctttcggtctctccttaggtcccgactaacccagggcggacgagccttcccctggaaaccttagtcttacggtggacaggattctcacctgtctttcgctactcataccggcattctcacttctatgcgttccagcactcctcacggtataccttcatcacacatagaacgctctcctaccatacctataaaggtatccacagcttcggtaaattgttttagccccggtacattttcggcgcagggtcactcgactagtgagctattacgcactctttgaatgaatagctgcttctaagctaacatcctagttgtctgtgcaaccccacatccttttccacttaacaattattttgggaccttagctggtggtctgggctgtttccctttcgactacggatcttagcactcgcagtctgactgccgaccataattcattggcattcggagtttatctgagattggtaatccgggatggacccctcacccaaacagtgctctacctccaagaatctctaatgtcgacgctagccctaaagctatttcggagagaaccagctatctccaagttcgtttggaatttctccgctacccacaagtcatccaagcacttttcaacgtgccctggttcggtcctccagtgcgtcttaccgcaccttcaacctgctcatgggtaggtcacatggtttcgggtctacgtcatgatactaaggcgccctattcagactcggtttccctacggctccgtctcttcaacttaacctcgcatcataacgtaactcgccggttcattctacaaaaggcacgctctcacccattaacgggctcgaacttgttgtaggcacacggtttcaggttctatttcactcccctcccggggtgcttttcacctttccctcacggtactggttcactatcggtcactagggagtatttagggttgggagatggtcctcccagattccgacgggatttcacgtgtcccgccgtactcaggatactgctaagtacaaagactattttaaatacgaggctattactctctttggctgatcttcccaaatcattcttctataatctttgagtccacattgcagtcctacaaccccgaagagtaaactcttcggtttgcccttctgccgtttcgctcgccgctactaaggcaatcgcttttgctttctcttcctgcagctacttagatgtttcagttcactgcgtcttcctcctcacatccttaacagatgtgggtaacaggtattacctgttgggttcccccattcggaaatccctggatcatcgcttacttacagctacccaaggcatatcgtcgtttgtcacgtccttcgtcggctcctagtgccaaggcatccaccgtgcgcccttattaacttaaccttattttctgacctttcagtcataaactcttattaatactacagcgttttcggtttattttcttgttactatttgatatagatattcaattttcaatgtgcattacttggtgatctctcaccaatggagcctagcgggatcgaaccgctgacctcctgcgtgcaaagcaggcgctctcccagctgagctaaggccccacaagacctctcaagactaaacaagaccaatgcgcagttccttatccttagaaaggaggtgatccagccgcaccttccgatacggctaccttgttacgacttcaccccaatcatctatcccaccttaggcggctggctccttacggttacctcaccgacttcgggtgttacaaactctcgtggtgtgacgggcggtgtgtacaaggcccgggaacgtattcaccgcggcgtgctgatccgcgattactagcgattccgacttcatgtaggcgagttgcagcctacaatccgaactgagactggctttaagagattagcttgccgtcaccggcttgcgactcgttgtaccagccattgtagcacgtgtgtagcccaggtcataaggggcatgatgatttgacgtcatccccaccttcctccggtttattaccggcagtctcgctagagtgcccaactaaatgatggcaactaacaataggggttgcgctcgttgcgggacttaacccaacatctcacgacacgagctgacgacaaccatgcaccacctgtcacctctgtcccgaaggaaagctctatctctagagcggtcagagggatgtcaagacctggtaaggttcttcgcgttgcttcgaattaaaccacatgctccaccgcttgtgcgggcccccgtcaattcctttgagtttcaaccttgcggtcgtactccccaggcggagtgcttaatgcgttagctacggcactaaaccccggaaagggtctaacacctagcactcatcgtttacagcgtggactaccagggtatctaatcctgtttgctccccacgctttcgagcctcagcgtcagttacaagccagagagccgctttcgccaccggtgttcctccatatatctacgcatttcaccgctacacatggaattccactctcccctcttgcactcaagttaaacagtttccaaagcctactatggttaagccacagcctttaacttcagacttatctaaccgcctgcgctcgctttacgcccaataaatccggacaacgctcgggacctacgtattaccgcggctgctggcacgtagttagccgtccctttctggtaagataccgtcacagtgtgaactttccactctcacactcgttcttctcttacaacagagctttacgatccgaaaaccttcttcactcacgcggcgttgctcggtcagacttccgtccattgccgaagattccctactgctgcctcccgtaggagtctgggccgtgtctcagtcccagtgtggccgatcaccctctcaggtcggctatgtatcgtcgccttggtgagccgttaccccaccaactagctaatacaacgcaggtccatctggtagtgatgcaagtgcaccttttaagcaaatgtcatgcaacatctactcttatgcggtattagctatcgtttccaatagttatcccccgctaccaggcaggttacctacgcgttactcacccgttcgcaactcatccagagaagcaagctcctccttcagcgttctacttgcatgtattaggcacgccgccagcgttcgtcctgagccaggatcaaactctcattaaaaagtttgagttctcactcatttctgtcactgacagatttattgtttttttcattgttcagtactacaacttatgttgtagcgccctgcacattggttcgtcttgttcagttttcaaaggtctttgtcacttgcttctctcaagcgacaactatattagtatatcacagccactttcacttgtcaacactttttttgaagatttttaagtttttttaaactttttttcatcaagtgttccaaccgcaacataccatagtccgtacgggattcgaacccgtgttaccgccgtgaaaaggcggtgtcttaaccccttgaccaacggacctgagttgttattttcaactcttactattatacagtcttttcaaactttgtcaactactttttctaatttttttttattttttcaacttatagtaaaaaaagccagaattatactgactcttctatcgctcattaaacttagaagcacgttcttttccccaccaataagggattagttctgcgactttaactgtttttcttatattatagtccatcatgaattctgcatctttattttcagcattaagctctaaaaggaattctctacaagcaccgcaaggcatggctgaacttccaccataaggtggtttgtctcgaaaggctaatactttcttaaccttagtttgtcctgaaaattggtacatattgaagagggccgcccgttctgcgcagagatggaaaacaccacaggttccctccatacagaatcctgtaaatatttgtccatctcctgcttctactgcagctacaacatgattggcataaacaaagtctgatacttcatgtggattgtatagtttctgtgcttcttcgtacatcttttcccagatgtccattattgtatcctctttatttagagatttcttttagcatgttttcgatatgctgaattgatttttcacgtccaagcaagaaaattgtatctggtaattctggcccatgcatttcgcctgaaactgcgatacgaataggcatgaaaagatttttccctttaatacctgtttctttttggactgctttaatttgtgggaagatattttctgtcacaaattcatcatctgtcatcgcttcaagttttgctttgaatgcttcaagaactgttggaactgtttcacccgtcatgacttcgcgctctgcttctgtcaattctgggaaatctgagaagaaaagatctgtcaatgggataatctcatctactgatttcatttgtggtttatagagctcaactaatttttcagccttgtcagtcaaacggcctgcttcctctaagaatggttttgccatttcaaagatggtttcaaggtctgcattcttgatataatcattgctcatccagtctagttttttctgatcaaaggctgctggtgacttgctgaggcggttttcatcaaaaagtttaatgaattcttcacgagagaaaatctcatcttcaccacctgggttccaaccaagaagagcaataaagttaaagactgcttctggaaggtaacctttctttcggtaatcttcgataaattgaagtgtattagtatcacgtttagataacttcttaccagtttcagagttgataatcaaggtcatgtgaccgaactctggagcttcccaaccaagagcttcatagaccataagctgttttggtgtattagcaatatggtcatctccacggataacatgagagatttgcatatcgtggtcatcgataacaacggcaaagttgtaagttgggtaaccgtctttcttttggataacccagtcaccaccgatattgccaccttcaaattcgatatcgcctttgaccatatcatgccacttgtagatacctgactcattgacagccaaacgaacagttgggatgatccctgctgcttcacgttctgcgatgtaagctgctttttcttcttcactcataccaaggtattcattgatgtagcgtggtgtttcgccagctacttcttggcgttcgcgttcagctgccaactcttcttctgtaacgtaagatttataggcttttccttcagctaatagttggtcaatatatttttgatacaagtccaaacgctcagactggcgataattctcatgtgattctggactttcatcccaatccatgcctaaccagcgaaggttttcaagttgtgaacgttcaccatcctcgacatggcgtttacggtcagtatcttcgatacggatgagaaatgttccaccatgatggcgcgcatacaagtaattaaacaatgctgtacgagcatttccgatgtgtagtagtcctgttggacttggtgcgtaacgtacgcggatatcttttgacatagtttctcctattatctaggcgtctgcctttttgctttctatattatatcacaagtcttggctgagtccaatttctatggataaagagagtaaaaagagtgggcaaaccactcttttcttctattatagacgtgcgttaagttctttgctcaattcttcaaatcctggttttccaagaagggcaaacatgttacgtttataagcttcaacacctggttggtcaaatgggttgatagcattcaagtaacctgaaagggcaattgccaattcgaagaagtagatagtgtaaccaagagtgaaagcgtcttgctctggaagagtcacatacatgtttggtacatcaccatctgtgtgggcaagaagaacaccgtcagttgcttttttgtttacaaagtcaacgtcttttccttgaaggtaaccaagtccgtcaaggtcttcttccaaagtaggaataagcacgtttttacgaggtttgtcaacacggacaactgtttcaaacatgatacgagttccttcttggataaattgaccaagtgagtgcaagtcagttgagaagttggctgaagttgggtagatacctttttggtcttttccttctgattcaccagccaattgtttccaccattctgagaagtattgaagtgatggctcatagtttaccaagatctcagttgcatagcctttacgataaaggatgttacgaacagctgcgtattggtaagcttcgttttcagagattttgtctgaagtgtagtctttgcgagctgcattcgcaccttccataagagcttttatgtcagctcctgatgctgcgattgaaagcaaaccaacggctgtcaatactgagaagcgtccaccgatatcatctggaacaacaaatgttccccaaccgttagcgtctgcttcaaccttaacagcacccttttggcggtcagttgttgcatagatacgtttgttagcttcttcttgaccgtatttcttaaccaagagttctttaaagacacggaaagcaatcgctggttcagttgttgtacctgatttagaaattacgtttactgagaagtctttgtctgcaacatactctaccaagtcagcaaggtaagtagatgagattgagtttcctgcgtaaaggatttgtggagctttgcgttcttcttttgtttgcaagttagcaaaatggtgattcaagaagtcgattgctgcttttgcaccaaggtaagatccaccaataccgatcacaaccaaaacatcgctgtctgacttgatttgctcagcagctttcaagatgcggtcaaattcttcgcggtcgtatttttcaggaaggtccaaccatcccaagaagtcgctaccagcaccagttcctttacggattaattcatctgctgctgttacttgtgattgcatgtattccacttcatgtggtgcaacaaatttgtctaaaacttttgaataatcaaatttaatatgtgacatgttcttcctccaatatttcttcttttctatcataacgcttaccttcgtttttttcaagtttttttgtcgaatttctccaatttttatcagaattcaaacgtttgcgtaaaatgccacattctaaaaattttgaaaaaataaaagaaagaacgaccagatgttccaatcgttacagttcattcaataaatactcaaataattctaaattgccatcttcttcattaaccagaaactctggatgccactgtaaaccgataatgcggtgctcgtcgatagactcaatcgcttcaatagtttggtctcttgaatcaatagcagttacacggaaattaggtgccaaatctttaatgctttgacgatggactgagttgacctgactttctttcccaaatagcttagccaccacgcttccttctactgtctcaatagagtgagatgtcccgaaaggtagtccttgccagtgaccttcgatttcttgattgagggttccaccaaaggcaacattgacaagttggacaccgcgacagattgccataattggtttattctgacgaagcgcttccttcaagagtgccaattcaaattcgtcacggaccagattgtaatcatcgctctcgacggtctttttctctccataaaactgaggatgaacattttggcctcctgtcaaaatgagtttgtcaatcatttccacataatcacgtacaactgactcatcaccaacaggaatgactaaagggagaccaccgacttgacgaatgatctctgcgaatctacaagatacagatgaatgaatgattttgccttctgcgtctacgggacatagatttgcagcaactcctacaaccgttctagccatgatgcctctcctttcgaatgctaacgatagtcctatcatatcactcaaaatgactttcgtctaatatgttttttttaaggctgtgataaacattttttatggacaagaaaaagctgcccacataggacaacttctttcttattcgaaaacaaattgattgtgatagagttctgaataaaagccacctagcttcaaaagttcatggtggttaccacgttcaatgacttctccatctttaaggacaataatctgatctgcattgagaatggttttcaagcggtgggcaatgacgaaactagttctacctgctacaaccacctccatggcatgctgaatcttgctttctgtcaccgtatctacgtttgaagttgcttcatcgagaatgagaacttctggatctgtcatcagggttcgagcgattgaaatcaattgcttctgccctgttgaaaagatgctctggtcatcatcaataagagtatcgtacttatcaggcaaactttcgatatagtcgtgaatgtgggttgcttttgctgctacctcaaccatttcctgactagcatctggcacaccaaatcggatattgtctctaatcgttccgctaaacaagaccgaatcttgcaatacaattcccaccttgcttctaagactatctaagtcatagccacgaatgtctttaccatcaaaataaataccaccagcatcaacatcataaaagcgattgatgaggttcataatagtcgtttttcctgaacctgtcggcccaacaactgctgtcatctggcctttaggggcagaaatgctgacatctttcaaaataggtttatcaggcaagtatgaaaaaacgatatgactgatttcaacactttcttgcaacttagtgaaggttggagccttttcaggtcggatttcctcctctgcatcaaacatttcctgaattcgttcagctccagtaaaggccaactgaaggcttccccaactcgctgcaacttggataataggctggtagtactgctgtgaaaattgtgcaaacataacaatcaaacctagggctgtacttgtttcaatagacttatcattcaaaagtacagccgaaccagcaaagatgacgatggctgtattaatcaggctcatcccattcatgacagggaaaagaattcctgagaacattcttcctttaaaggttgccttgcgcacgcgctcattttgttcaagaaatcctgccatcatatcctcttgaattccttgcacaatcacggctttttggcctgagatgctctcatccatataggcgttgagcttccctacctctttctgctggaggttggtgtatttgcgtgccattttcacgatgaaaatcagcataaggaaagccaatggggtgctggcaatggtgatgagagccagcgtcacatttctcgaaaacatgacaagaatcagaccaatgtataaaacaatattgctcatgacctgaatcaagctttcgttaaaggcttggaggatattatccaaatcactggtaaaatgagacaggatatcgccatcttgtcgacggtcaaagaaagaaaccgtcaactgagcaagcttaccaaagaggcctttgcgcatctcgttggtcgattctgcaatcacgcgcgtcatgagacacatgtatattacactagagataaatagaaccaaaaccagcaggccaagattgaccatgattcctgataggctttgccatacaagttctggattgccattttgataagcttgaactaaattggctagctgcgtcaccgcttgtccagaaaagactggaaagagggcttgggcaaaagtcgccagaacaatcatcaggatgacaactacaaatgagaacttgtagaccttaaaataatgccaaaaaaattgaactgtcttcattttactcctccttatattatatttagcgcagttagctactgccaaagcccaagtggtatacttggaataagccgctgtggattagttcatttcctccaatcgcttgacaatttccgaaaggatctaaccacagctttttgttttaattggtaatgagtttgataacgcatagacgttttatctcgtgtaatgaaaacatcaaacattacaagaggctcattgacaaggcggaaacatgtgtcaatgacttgatggctgagttcaactcggtcatcacgacggttactgggattggggatcgtttaggggcggtcattttagctgagattcgaaatattcatgcctttgataatcctgctcaattacaagctttcgctggactggattcttctatttatcagtcagatcagattgatttagcaggaagaatggtcaaacggagttcccctcatctgcggtaggtactcatacaagctgccaaagcatgccctcgcttttcgcctgcttttaaggcctatcttaagactaaattagaacaaggaaaacattacaatgtagccatcatccaccttgcaaaaaaacttatccgaaccctgttttatatcctaaaaaaagagctgccatttgacgaacaaaaagtgatgtaatttctgaaattaacacaggattacctttgaaaaaatggactttttcaagggctttttgccgtgctctaaaatcatcgccaaatcatcaaattgaaataagaaatagtttagataaaactattgacttttcttatagtttgtctttcatttctgtgtttcatagatttcacggtaaacggcattgttggcaaccaagtctgcatgcgtaccttgaccaatcaatcgtccttgatttagaaccaagatcttgtctgcatggacaaccgagctaattttttgagcaataataatggttgtcgtccccttcaagtccttattcaaagcttcttgcaccaagcgctctgatttggcatccaaggctgaggtcgaatcatcaaaaatcagaatacgtggattgctgacaatcccacgcgcaatcgacatcctttgtttttgtccaccagagaaattggttccccgttcttcaactggactttcaaaggttttctccatacgatgaatgaattcactagcctgggcaatattggctgcgcgctccatttcaaatagagtagcattccccttcccctgtctcaagttatctgcaatcgttccactaaaaagaatggcacgttggagaacgatggaaactgttttacgcagggttccttcactcacttctcgaatatccttgccaccgattttaatggccccgtcctgtggatcaaagagacgtggaatcaattgagccaaggttgactttcctgcaccagtcgctccaactacaccaaccatttgaccaggttcaatagtaaagctcacatctttcagcatcggttccttgtccattggataggtaaaggtcacattttcaaagctaagacttccaaccaactcttcatctgggatatccttgaaggtcatagctggctctgcgtcaagaatttctcgaatacgacgcatggaaatcatggcacggctgacagaatttcccaaaaatccaaccataacaatggtaaagataatctggcttaggtaattaacaaaagaagcgatggaaccaacaacagacggatccgactgaaccattcccgcgaccagccaaatagagaggaagaccgccccgtaaccaaccaacatcataaagggttccactactgaaaaggcataaccaatgtaaaggttttgaccaagaagctcgtctgagacctctgtaaacttagcaaattgctctttttcttggacaaaggacttgaccacacgaacgccacgtaaattttccttggcaatggcattgatgcgctcaagaagggtttgaaacttggcaaaacgaggccccatcattcccatcatgacagcagtcaaaccaaaaatcaagactaccatgagaacaatcacccaccacagagaaggtaaggtttgaaccgctaggataaacgaaccgatgaacaagaggggaagtctgaaaagaatttggaaggtcatcatgacaacgttctgaatctggttgatatcatttgtcattcgaacgactagatttcccgcattaaattgttcaatatcagcataagaaaaggtttgaattttacggaaggcatcctcccgaaggtcggatgaaactccttgggcaatataggctgcgaggacaacattgagtccaccagcaactagaccgactacggccacaccaatcaaccaagccccgatactataaatagcttcatatttcccagtaaggagggcgcctaagacttcctgcagataacgcggttgcagaagtgaactagcaaccatcaagcctgtcatcaggagcgaagccagggcctgccacttgtaggtttttattttctgaatcagcatactttctccttaaaaaatagacaaaagggagcgacaatgcgtcagctccttttcattctgtttgtgtgatgttattctagcaaaaaagtggagaattgtcaaagaagtctccttgatacagctagattaactagtgagtcttggttttatagtttctgttttaactctactaagacattcataacctgcataggtgtcatattatacacatccagtttagctaattctgctaggataggatgctcttctgccctatcaaagagtgaaatctgttcagtgacagcactagtttgtctcatgggaggaggactctctgttccttgattctctagctgagtcaaaatcttatccgcccttgctaaaaggtctgctggcaagccagcaatcttggcaacatggataccgtagatttatcagctggtcccggttcaatcttgtgaaggaaggtgacctgcccatcctgctccaaagttgccacgtggacattgaccaagtgttgtaaactagactccagactagtcaactcatggtagtgggtcgcaaagagggtcttagctccgatgtgctcatggatatattcgatgatggactgagcaagagccatcccgtcataagttgcagttccacgtcccaattcatcaaagagaatgagagagttcttggtcgcatgcgaaatggcattattggcctccatcatctccaccataaaggttgactgacccgaaaccaagtcatctgctgctccgatacgggtaaaaatcgcatcaaaaatcggtaaatgggcgctttcagcaggaacataggaacccagctgggccataaccgccgtcatggctaactgacgcatataggtagacttcccactcatgtttggccctgtaaccagttgaatactggtatcttctgccatctgaatcgtatttggaatataggtctgagcccccataaccttttcaacgacagcatggcgccctttccggatatcaatttgtgaatcgtcaccaaactcaggtcgaatcaaatgctgggtttcagccacaaccgccagactctgtaagacatcaaccgtcgcaattccttgggctagagcttgtaaacgctggatgtacttgccgacctcttcacgaatgcgcataaatatttcgtattcgaggttggctgacttctcacgcgcctcaagcatatctccctcgatacgggctaattcttcggttccaaagcgttctgagtttttcagcgtcgccttgcggaaaaagtgagctggcacatttcctagttgcgaattggtcacatgaaaatagtagccatcctttttattgtagtcaatcttgagcgtgctgataccagagttttctcgctccttagcctcaatctcagcaatccagctagtcccttctctgagaacgcaacgatacttgtctaaagtctcatcaaatccagtccggataattcccccatctgtaatcacatgaggagcttcaggagcaatcgctgcgctaatcaaactctccaactcagggattgcatccagttgtgcgatgagataggctagagtaggttgctccatcccttctaaaatcgcacgaatccgtggcacactagacaaggtagtcgccaactgcaagagatcctttggattggttttgccaaaagaaacacgactagccaagcgctcaatgtcataaacacccttgagactgtctgtcaagtcactacgctcaaagaaatggtcgagaaagacctgcactacttcttgacgttggacgattcgttccttatcaatcaaggggcgatgaatccaagaacgcaagagacgcatccccatagccgttttggtttcatccaaaagccagaaaagactgccttgtttcttacctgagcgagcattctcaaccaaatccagactagccttggtcgcataatccatctgcaagaaatccttaatttcgtagcggataacaggtttgaggtggttcaattccctcatctgagtccgatgaacatactggagcagcttactagatgccgtttgctccaccgttgccaatcgcaaatccaataaatgaaggtcttcaaagctttctttttcataagagagtaccagattcatctggcggctgaggatttgttcttcttcctcagacaagtcataacccaacaccacttctcgagccttgaggttacggatttccccacaaaccagcgtgaaatccaaaagacctgtcacataaaagtcacccgtcaccaaatccatataagctaggccaaattgattgccttcgcggtctatggaaaccaaaaaattattctgactgtccggcttactgctatcgaccactgtccctggcgtaatgacctgaacaacctctcgtttaacaaccccaactgcttgtttaggatcttccatctgctctgcgatagccaccttataaccctgctcaatcaagacatcgatatactgttgggcagaatgatagggaacacccgccatagggatcggattgtcggcattcttgttgcgactcgttaaggaaatttccagaatctgcgcagcattgaccgcatcctcataaaataattcataaaaatcacccatccgaaagagcaaaaaagcatctggatattgctttttaatatccacatactgttgcatgccgggtgataacttttctatcgccattttctgtctctccttttcaaaaataagtcttgagagcaactcccaagaccttacttatctttcatcaaatctagcaaacgatcttccatgagtttggcaacgtgctgatctcgacaaataaccaataaggtattggcaccagcaactgttcctaaaatccattcatccttgtttacatctacaatatttgccaaaacagaggcttctcccaatttggtatgaagcaccaaggtaaactctgctcttgcaacaccttctaaatgatgagacaaaaattccaccaaatcaatcttttctgtctcatttactagtacataatacaccatatcatttttcttgaccttggtcaagccgatttcgcgcaaatcacgagacaaggttgtctgcgtcacacaaacattgtgcgcctccaaccgatcttgaatttctttttgtgtacttaatttctcctcagtaatcattttttttattaactgatgacgatctctttttctcataaaatcctcttgcgtgcatatttataactatatttataaccatattataccaaaaaaacaggagatttcaaaaattttttcttctttctttaaaattgtgataaaatagtagaaaagtccaaaaaggagctcttaatgaatacaaaagaattgattgctagcgaattatctagcatcattgatagcctggaccaagaggctattttaaagttactggaaacccctaaaaactcagaaatgggagacattgctttccctgctttttctcttgcaaaagtcgaacgtaaagcaccacaaatgattgcggctgaactggctgaaaaaatgaacagccaagcctttgaaaaagttgtcgcaacaggaccttacgttaactttttccttgataaatctgccatttctgctcaagtattgcaagctgttaccactgaaaaagaacactatgctgaccaaaatattggtaaacaagaaaatgttgttatcgacatgtctagtccgaatatcgctaaaccattttctattggccacctgcgttcaactgttatcggagatagcttgtcacatattttccaaaaaatcggttatcaaacggtcaaggtcaaccatttgggagactggggtaaacaatttgggatgttgattgttgcctacaaaaaatggggcgacgaagaagctgtaaaagctcatccaatcgatgaactccttaaactctatgtccgcatcaacgctgaagctgaaaatgaccctagcttggatgaagaagcgcgcgaatggttccgtaaacttgaaaatggagatgaggaagctctcgctctttggcaatggttccgcgatgaaagtttagtggaatttaaccgcctttacaatgaattgaaggttgaatttgacagctataacggagaagccttctacaatgataagatggatgcagttgtagacattctttctgaaaaaggactacttcttgaatcagaaggtgcccaagttgtgaatcttgagaaatatggaattgaacatccagccctcatcaagaagtctgatggtgcaactctctatatcacacgtgacttggctgcagccctctaccgtaaaaacgaataccaatttgctaaatctatctatgtcgttggtcaagaacaatctgcccactttaaacagctcaaagctgtcttgcaagagatgggctacgactggagtgacgacattactcacgttccttttggtttggttacaaaagaagggaagaaactctctactcgtaaagggaatgtcatcttgctagagcctactgttgcagaggctgttagccgtgccaaggtccaaatcgaggctaaaaatcctgaactagaaaacaaagaccaagtagcacatgctgttgggattggagccattaaattctatgacctcaaaaccgaccgtacaaatggatacgacttcgacctagaggctatggtatccttcgagggtgaaactggaccttacgttcaatatgcctacgctcgtatccaatctatcttacgcaaagccgatttcaaaccagaaacagctggcaactatagcttgaatgatactgaaagctgggaaatcattaaactcattcaagacttcccacgtattatcaaccgtgcggcagataactttgaaccttctatcattgctaaatttgcaattagcctggctcaatcctttaacaaatactatgcacatacacgtatcttggatgaaagcccagaacgcgacagccgtctagccctcagctacgcaaccgcagtcgttctcaaagaagcccttcgcttgcttggagtagaagcgccagagaagatgtaaatcgccaaagttacttgattgcaaagcaatctaagtaactaacgccaaatcctattcggactttggctaggcgcttcactagttttaggacataaatatgatcgatttatgtcctaaaacgtcgtaatcttaaagttattggaactaaagttcctaattgttagacgctagccgcttatatgcgaactagctaactgcttcactagtcatgacccctaaatataatcgatttagagtccatgacgtcgtaaccagagacacttgcctaaacgcttcactaattcacctaaccaaataatagacttcctgcaaaactagaatcctagttcatgattgataatgccagcaatcaaattcattcgtaatccgaagtgtttacgatgatttcgataggttgttgaaatcattttaaacgtttttactttggcaaagatgttctcaaccttgcttctctccttggatagcgcatggttataggctttatcttcaactgttagtggcttgagtttgctggatttacgtggagtttgtgcttgaggatatatcttcatgagcccttgataaccactgtcagccaagattttaccagcttgtccgatatttctgcgactcattttgaacaacttcatatcatgacaatagttcacagcgatatccaaagaaacaattctcccttgacttgtgacaatcgcttgagccttcatagcgtggcattttttttaccagaatcattcgctaattctttttttagggcgattgatttgtacttccgtcgcatcaatcattaccgtgtcctcagaactgagaggagttcttgaaatcgtaaaaccactttgaacaagagttacttcaacccattggctccgacggataaagaagacttgataagaactctagagttagctccccatattgaaggtggctattttagacaaacaaaaaaagcttcagacactataaaccttgctggtaagggaagggcgctttataccagtatttatttcttattagaagaaacgaatccttcacattttcaccgattgacagcagatgaaatctggtattttcatgcaggatccccacttactgttcacatgattacagcagatggtcactacgaagcagtcactttaggcctggacatatccaaagggcaacaacttcactactgtgttcctaagggcactatttggggatcaacagttgataaggatgatgctctggtttcttgtcttgttgctcctggttttgaatttgaggattttgaattatttgaaagggtagatctactggcgacctatccagagcacaaggagatgattgagcgtttgaccagatactagtcttgataggcaaatttaatctgatttagcaatgttaggatttctgataattgtgttataatgttaccaataggagataatagatgacaaaacaagtcttattagtggatgatgaagaacacattctgaaattgcttgactaccatttaagtaaggaaggcttttctactcaattggtgacaaatggacggaaggccttagctttggcagaaacagaaccctttgattttatcttgcttgatatcatgttaccacaattagatggcatggaagtttgtaagcggctgagagccaaaggcgtcaaaactccaattatgatggtttctgcgaaaagtgatgaatttgataaggttttggccttggaattaggggctgatgactacctgaccaagccttttagccctagagaattgctggcgcgtgtcaaggctgtcctcaggcgaactaaaggagaacaagaaggagatgattcagataatatcgctgacgattcttggctatttgggaccttgaaagtataccctgagcgtcatgaagtctacaaggcgaataagttactgagtttgaccccaaaagaatttgaactcttgctctatcttatgaaacatcccaacatgacactgactagagagcgtcttttggaacgtatctgggggtatgactttgggcaggaaacacgtttggtggacgttcatattggtaagttgagggaaaaaattgaagacaatcctaaagcccctcaatttattcgaaccattcggggttatggttataagttcaaggagttatagatgaaacgctaccttcaattttggctagtcaatctaagtgttagcctcattctgattgcagggatggcattaacttggatcagtaaaggcatcggtctctttcttctagccctttctttgggactaggtggctactggctcttttgcctttggaaatgggaagttgcttttgagaccttgcaccaacctctcttgaccagtagtgaatactttttagaaaaagggcaagaagacttaaagtctttggctcagtatgtgtctggcctaaaaaccaaagtctcccaacaggatcagcaatacaaggatctagccgaaacaatggaggttcttctgtcgcacctaaccatggggacgtttttagtttccgctcaaggtcagatgttattatccagtcgctctctgcctcattattttcccgatgtggacggcgacataagttcacttgatgacctcaaacggatggatattcggaatttagttcaccaagcctttgatcaaaaaacaaggttaaaacaagaagtaagtgggtttcatgagggtgacttgattttagaagtgacagcagttcccgtttttagccccacccaatctgtggaagctgtgctcgtcttgctatatgatttaacaacgattagaacttatgaaaagttaaatttagcctttgtctcaaatgcctcccatgaattgaggacaccagttacttcgattaagggctttgctgaaaccattaaggggatgtcagctgaagaagaagcgctcaaggatgactttctagacattatttacaaagaaagtttgcgtcttgagcatattgttgagcatcttcttaccttatctaaggctcaacaaatgcctatacaatggacgaccctttctttggcagaatttgtacaggatttgactcaaagcttgcaacctcagctcaagaagaaggatttacagctaaaggtgcaggtgccagatgatgtcaccctcgtatcagatagtcaattactttcccaaatcttactcaatcttttatccaatgccatccgttacactgaacaagggggaaaaattgaggtcaagacccaaaaggtgaacgaaggcattaagatttctgtatcagatacagggattggtattagtcaattagagcaggatcgtatttttgaacgtttttaccgagttaataaaggtcgaagcagacaaactggtggcactggtcttggccttgccattgtcaaagaactcagtcaattattaggtggccaagtcacggtgacgagtcagcttggcagaggcagttgcttcacgatttttcttcctaaccaatctttcgcacaggactaataatttttaaagctatttttaggagcagccatttttcaaaagtggctttttttgattctttacacaatctttacatgaatcagggataaacctttacaaagacttgttagactataaatgtagtaagcctacacaagaaaaatacatagagataaaggtgattattatgaaattcaaaaaaatgcttactcttgcagccattggcttatcaggatttgggcttgttgcctgtggcaatcagtcagctgcttccaaacagtcagcttcaggaacgattgaggtgatttcacgagaaaatggctctgggacacggggtgccttcacagaaatcacagggattctcaaaaaagacggtgataaaaaaattgacaacactgccaaaacagctgtgattcaaaatagtacagaaggtgttctctcagcagttcaagggaatgctaatgctatcggctacatctccttgggatctttaacgaaatctgtcaaggctttagagattgatggtgtcaaggctagtcgagacacagttttagatggtgaataccctcttcaacgtcccttcaacattgtttggtcttctaatctttccaagctaggtcaagattttatcagctttatccactccaaacaaggtcaacaagtggtcacagataataaatttattgaagctaaaaccgaaaccacggaatatacaagccaacacttatcaggcaagttgtctgttgtaggttccacttcagtatcttctttaatggaaaaattagcagaagcttataaaaaagaaaatccagaagttacgattgatattacctctaatgggtcttcagcaggtattaccgctgttaaggagaaaaccgctgatattggtatggtttctagggaattaactcctgaagaaggtaagagtctcacccatgatgctattgctttagacggtattgctgttgtggtcaataatgacaataaggcaagccaagtcagtatggctgaacttgcagacgtttttagtggcaaattaaccacctgggacaagattaaataaaatgtttgctccataaatctctaaagagatgcagacgtttcatcgtacaataagataaagaaggcaagtagggaggtgtcgtatctcccttactttcttcactagaaaggacaagatgtgacaaaacaagccttcaaagaagcagtttttagggcaatttttttcatgagtgcaacagtagctgttgtagctattttgctaatctgtttctttatttttagtaatggcttacctttcatagctaactacggctttgcccgttttttattaggcagtgattggtcgccaacgaacattccggcaagctatggtattttaccaatgatcgttggttccttattaattaccttaggagcgattgtgattggggtgccaacaggcatcttgacatcggtgtttatggtttattattgtccaaagcccgtctatggcttcttaaaatcagctatcaacttgatggcagccattccatctattgtttatggttttttcggcctacaattattggtgccttggattagaagctttttaggaaatggcatgagtgtcctaaccgcttcgttactattaggaataatgattttgccaaccattatcagtttgtcagaatctgctatccgaacagttcccaaaacgtattattctggtagcttggctctaggagctagtcatgaacggagtatttttagtgtcatcttgccagctgcgagatctggtattttatcagcagttattttaggaatcggtcgcgcagtaggtgaaaccatggcagttattttggtggcaggcaaccagccgattattccaagtggactcttttcaggaaccagaaccttaacaaccaatattgttctggaaatggcttacgcatcaggtcagcatagggaagcccttattgcaacctcagcagttctctttttccttattctcttgattaatgcctactttgcctacttgaaaggaaaatcatcttatgagtaaatacctgctaaaacttctcgtttattgtttttcagctttaacctttggctctctctttttaatcattggttttatcctcatcaaaggcttacctcatctaagtctatccctcttttcttggacttatacttctgagaacatttcccttatgccagcgattatttccaccgttattctggtctttggtgctcttcttttagccttgcccatagggatttttgctggtttttatcttgtggaatatacaaaaaaagattccctttgtgttaaaatcatgcgattggcctcagataccttatctgggattccttccattgtttttggtctgtttggcatgctcttctttgtagtcttcttaggttttcaatactctctgttatcaggaatcttaacctcagttatcatggtgttgccagtcattattcgctcaacagaagaagcccttttatctgttagtgatagcatgcgtcaagcaagttatggacttggggcaggtaagttacggactgtttttagaattgttctaccagttgccatgccaggtattttagctggagtgatactagctattggccgtatcgttggtgaaacagctgccctcatgtatacattaggtacctctaccaatacgccaagtagtctcatgtcttcaggccgttctctagccctacatatgtatatgctgtcaagtgaggggctacatgtcaatgaagcctatgctaccggcgtgattttgattattactgttttaatgataaatactctatcaagcttattatctcgaaaacttgtgaaaggagcttcctagtatgggaacattttcagtcagacacctagacttattttacggggattttcaagccttaaaaaatatttcgattcaattaccagaaagacagattactgccttgataggcccatctggttgtggcaaatcaacttttctaaaaacccttaaccggatgaacgatttggttccttcttgccatattgaaggccaagtcctcttagatgagcaagatatttatagtagcaaattcaaccttaatcagctacgtaagcgtgtagggatggtttttcaacagcctaatccctttgccatgtctatctatgataacgtggcttatggcccaaggacacatggtattcgagacaaaaaacaattagatgccttagtggagaaatctttaaaaggggcagccatttgggaagaagtcaaagatgatcttaaaaagagtgccatgtccttatctggcggtcagcagcaacgcctttgcattgcgcgagctttagcagtagaacctgatattctgttaatggatgagccgacttcagccttagaccctatctccactttaaaaattgaagacctcattcagcaactaaaaaaggattatacgattatcattgttacccataacatgcaacaagcttcacgtatttcagataaaactgcttttttcttaacaggagaaatttgcgaatttggagataccgttgacgtgtttaccaatccaaaagatcagcgcacagaagactatatttcaggacggttcggataaggaaggaaaaacctatgagaaatcaatttgacttagaattgcatgaattagaacaatcctttttaggactagggcaacttgtccttgaaacagcttcaaaagccttactggccttagcctccaaagacaaggagatggcagagctaattatcaataaggatcatgctatcaaccaaggtcaaagcgctatcgaattgacctgtgcccgtttgttggccttgcagcagccacaagtgtctgaccttcgatttgtgattagcatcatgtcttcttgttcagaccttgaacgtatgggagaccatatggcaggcattgccaaagctgttttgcaactaaaagaaaatcaactagcccctgacgaagaacagttacaccaaatgggtaaattatccctcagcatgctagccgatttattggttgcctttcctttgcaccaagcctcaaaagctattagtattgctcaaaaagatgaacagattgaccaatattattatgccttatcaaaggaaatcattggacttatgaaagaccaagaaacctcaattcccaatggaactcaatacctttatatcatagggcatctggaacgcttcgctgattacattgctaacatttgtgaacgcctagtctacctagaaacaggagaactagtggatttgaattaattcaactaatccttaaaagagaagagtacgattaagtactcttttttatggttgtaaaaaagttcatttgaccaatttaagcagtgtagatagtgaggagttgtttcaattctatcgtgaacgagggaatgctgaaaactttatcaaagaaaggaaagcaggattctttggggataagacagatagttcgaccatgattaagaatgaagtacgtatgatgatgggctgtctggcttataatctctacctctttttaaagcagctagctggtgatgaagtaaagtccttgactatcaagcgttttcgacgtctcttccttcatattgccggaaaatatgtctctactgctagacgacatattctcaaattctcaagtctatacgcctattcaaaacagtttcaagccttatttgatacaatctgccagataaatctgatactccctgttccatatagagctagagggcaggggaaaacatgcctaacagaataagtcaccttattttaaaaatcgagcatcaaaccaagggaggagtctgcccttttttaggaaaaaatcaagacaaatctcctcaattatgtctcgaacatcagaaattaagcaaaatcaccagaaggacagtatttcaactagcttttctggtaatttttgaactgtgtagttcgttagtgccagatatgaataatttgggatgataaatctttcttcctcaggtagcctatcataatactcttcaaaaatcttatcaaaaacactctctttcttttgggcgatagtttcatcttcgtatgtaggagtcctcatcaagaaatacttcaattctaggtattccttatccaactctatataacttggcatcaacttgtaatcttcaacccccaaacgttcagcaatatattttaactttgttagtattggtctggattctccattttcaattctaattaattgacggatacttaattcagactcatcaccacaaaattctgaacgactgatttttttagccaaacgtaatcttttaattttttcgccaaactctcgcaacctacaagaacttcctgagttgtttacctctattataagcatatactgaatcaaactatctatcagatttcttctcactttaactaaagactaagagtttatcccttcgtctcggtttttgtgtatttttccaccataccccagtaatgcaagtgcaaaatcccctagaatatgatagaataagagaaagaactctatcaaggaggaaatcatggaaaaacaaaccgtcgccgtcttggggcctggttcttggggaaccgccctttcacaagtcttaaatgacaatggacacgaggtacgtatttggggaaatcttcccgagcaaatcaatgaaattaatacacaccatactaataagcactactttaaagatgtcgttctagacgaaaatatcattgcctacaccgacttagcagaaacattgaaagatgtggatgcgattttgtttgttgtcccaacaaaagtgacacgacttgttgcccagcaagttgcacaaaccttggaccataaggttatcatcatgcacgcatcaaagggattagaacctgatagccataaacgattatcaaccattcttgaagaagaaattcctgaacatctccgtagtgatatcgtcgttgtttcagggcctagtcatgcagaagagaccattgtgcgtgacctaactttaataactgctgcttctaaagatttacaaacagctcaatacgttcagaagctatttagtaatcactacttccgactttataccaatacggatgttatcggggttgaaactgctggtgctcttaaaaatattattgctgtcggtgctggagctttacatggtcttggatttggtgataatgctaaggcagccatcatcgctcgaggtttagcagaaatcacccgcctaggggtagcactcggggccagtccattgacctatagcggcttatctggtgtgggagatttgatcgtaacgggaacttccatccactctcgtaactggagagctggagatgctctcggacgaggagaatccctagctgatatagaagctaatatgggcatggtaatcgaaggaatttcaacgactcgagcagcctatgaactagcccaagaacttggagtctatatgcccattacacaggctatttaccaagttatttatcacggaaccaatatcaaagatgccatttatgacatcatgaacaatgaatttaaagcagaaaatgagtggtcttaaccctctatagaaaggatttttatgacatcaaaagttagaaaggcagtcatccctgctgctggactaggaactcgatttttaccagcaaccaaggcccttgccaaagaaatgttgccaatcgtagacaaaccaactatccagtttatcgtggaagaagctctcaaatcaggtattgaagatattctagttgtcactggtaaatcaaaacgttctattgaggaccactttgattcaaacttcgaattggaatataacctcaaagaaaaagggaaaacagatcttttgaagctagttgataaaacaactgacatgcgtctgcattttatccgccaaactcatccacgcggtctcggagatgctgttttgcaagccaaggctttcgtcggaaatgaaccttttgtcgttatgcttggtgatgacttgatggatatcacagacgaaaaggctgttccacttaccaaacaactcatggatgactacgagcgtacccacgcgtctactatcgctgtcatgccagtccctcatgacgaagtatctgcttacggggttattgctccgcaaggcgaaggaaaagatggtctttacagtgttgaaacctttgttgaaaaaccagctccagaggacgctcctagcgaccttgctattatcggacgctacctcctcacgcctgaaatttttgagattctcgaaaagcaagctccaggtgcaggaaatgaaattcagctgacagatgcaatcgacaccctcaataaaacacaacgtgtatttgctcgtgagttcaaaggggctcgttacgatgtcggagacaagtttggcttcatgaaaacatccatcgactacgccctcaaacacccacaagtcaaagatgatttgaagaattacctcatccaacttggaaaagaattgactgagaaggaataacaaaatcatttatataaagattagccacacataaattaagtaaattctctacttgaatctacctatttaataaaaactaatgaaaacgctatacttgtatttgttttttcattaaaataagagtagaataaattagtatagtaaaacaaaaaagcaccgaatcggtgcgcactttttcaagttgtgtacggacaaagccttattttaactttgctatgttgtttctaatggttccaaaataataaataattttaaatttgacttaactgttggagtagtcatggttaaattaaatcaaccgagccgaacataagttgtttaattttgtggaagctattaataaaaatataataagggagaaagataggtgtaattttaattttaaagtaattgcggacactatcaaagaaaaagattatggagaacaaatttgtagaatttatcgaaaacaataaaaaagtaatcatttcatcagttgcagttggtgttgtattggtattagggtttggatggtattcatataaccaacaacaagcagaacaacaagcaaaaattgtacaattagaaaaagatagcaaatcagacaaagaacaagttgataaactatttgaatcatttgatgcatcttcagatgaatctatttctaaattaaaagaactatctgaaacttcacttaaaaccgatgcaggtaaagactatcttaataacaaagtcaaagaatcatctaaagcaattgtagattttcatttgcaaaaaggtttggcttatgatgttaaagattcagatgacaaatttaaagataaagcaactcttgaaacaaatgtaaaagaaattacaaaacaaattgattttatcaaaaaagttgatgaaacttttaaacaagagaatttggaagaaactcttaaatctctaaatgatcttgttgataaatatcaaaaacaaatcgaacttttgaagaaagaagaagaaaaagctgctgaaaaagctgctgaaaaagcaaaggaatcttctagtcaaagtaattcttctggtagtgcttctaatgagtcttataatggatcttccaattcaaatgtagattatagttcatctgaacaaactaatggatattcaaataattatggcggtcaagattattctggttcaggagatagttcaacaaatggtggatcatcagaacaatattcatctagcaattcaaacagcggagcaaataatgtctacagatataaaggcactggtgctgacggctatcaaagatactactacaaagatcataataatggagatgtgtatgatgacgatggaaattaccttgggaactttggtggcggcattgcagaacctagtcaacgctaataactattttagagctgtgttgtttcgaatggttccaaaacacattaaaagctactcattttttaagtagcttttttcttattcaagtttacatattatactcaatgaaaatcaaattcaaaccacgtcagcatcgccttaccgtaggtatggttactgacttcgtcagtttcatctacaacctcaaaaccatgttttgagctgacttcgtcagttctatctacaacctcaaagcagtgctttgagcaacctgcggctagcttcctagtttgctctttgattttcattgagtattagtcgtcacaatcccattcccttgtagaaaagcaaaatggcgagtcctacgaacaagactaccgctcctaatctctggctggtgttatacatccgtttttctcctctaactggaaagataactgctagaaatgcgccaccaactgcaccaccgatatggcctgctaggctgattcctggaatcagaacacttccaataatgttaaccacaaaaagtgtcagataggattgccctagctgttggatataaggattgcgagttgcatagcgaagaacaataatcgcggcaaatagcccataaagagaggtagaggcgcctgctgctaaggatttaggactaaatacaaaaacaaagagattgcccatcattcctgataaaagatagagaaagaaaaactgcttagaaccgaaaatctcctctacctgccttccaagataataaagtgaaagcatattaacaatgaaatgttcccacccaatatgaacaaaaatggcagacaagagacgccaaacctgctcgggaaagaggcgaatagctggcccatacatggctccaaatcgaaataatgtatctgccctgtcaaagtttccgcctgcagtgaccaacattagtaaaaataccaaggccgtcactaagaggaagaaactcgtcacagggtaacgtctatcaaagatttccttcatcaattaatacctcctgaacaggaatatcatggttttcaggtataaagtcctgaatttgacaaggatatatcgtactcaaagtacgaccagaaaaatgttccagatagcggtcataatagcctccaccgtatcctatccgatatcctttcgtcgtaaaagccagaccaggaacatgaatcaaatcaatctgagatgcatccaccacttccaaatctccctgtagctccagtaaggcaaagaaagtttttaccaactgttgcggatcatagaccacaaagtccatgcgccccttgggataagttttgggtattaaaaccttcttgccgtccttcagcgcctgctcaatcagttcctgcgtttgaaactcatgagaaaaagagaggtaggttgcgatgaccttggcttcttgataaaaggggtgttgtaaaagccgctcggttaaagcttggtctatagcctgtttttgctcttgagatatagccttcatttcatgcaagacttgcttgcgtaattccgatttcatagacaagccctctattctgctgccttctttttcaggaaactagacaccgcagccaccccaatagctaagacttcttccttaggactcatttgagggtgatgaagagcgtagggactatcgatacctagccaaaacatcacgccatcaacctttgaaaggagataaccaaagtcctcgcctgtcatagcaggttcgatatcaatcaactcgattccgtctttttcgtcaaagaagtccatcagttcacgcgccaaggctggattgttctcaacaggtaggtatccaccttgtttgagttccacttcgacttccatatcaaaggcagctgcaaccccttctgcaactgtttttaccctcttttgcaccaagagactcatgtcctgtgtcaaggcacgaatagttccatgtaaaaaagctgtgtctgtgatgacattgttggtggttccagcttgaaaaacgccgaaggtcaccactgctccctcgattgggttgacattgcggctaacaactgactgcacttgggtcacaaagtaactagccgccaccaaggcgtcattggcttcatgaggaaaagctgcgtggccacctttgcctttgaaacggatcttcacctcgcaagttcctgcaaagagtgtatgagtattagtcgcaatctggccgactttcaaatctggacgaacatggagaccatagaattgatctggcaaccaatctccaaaagcaccgtcctcatacatgagcataccaccagcttcattttcttcagcaggctgaaatagaaagagcagattattcttgggttgctcctcaagggcgcgctcaagacagcctaaggcaatggtcatatgaaaatcatggacacaggcatgcatgcgaccttggtgttgagaagcaaaaggtagacctgtttgttcgacgataggcaggccatcaatatctgtccgccaaccaatggttcgctccggctgacttccctgcaggtagaccaaaatccctgtccgccaagtacgaatttgaacaaaatccttgcccgtagtcaatttctcaatcacatccagcaaataagcctgagtcttgaactcctccaagccaatctctggaatctggtgtaaatctcgtctagtctgaatcaaatctaacatctatctgtcctccgatatagcagaaagaggctggaaaaagggttccgcctcttttttacttttacaattacaaggtacgaagcgcatcctctagcgctgttttttgttgagtttgggcatcaatttctttgataatacgagctggaacacctgctactaccacgttttctgggacatcttgggtaacaatagctcctgctgcgacaactgaaccactaccgatttggactccttcgataaccactgcattagcaccgataagaacattgtctccgacacggactggttcagcactagctggctcaatcacacctgccaaaactgcacctgcaccaacgtggctattttttccaacgatggcacggccaccaaggatggcacccatgtcaatcatggttccagcaccgatttcagcaccgatattgataacagatcccatcatgataacagcattgtcaccaatttccacctggtcacggataatcgcacctggctcgatacgagcgttgatagcacgcttatctagcaaaggaactgcagaattacgagcatcttgctcgacaacataatcttgattttctaccaaaccttcaagaagcggagccacatccttccagtctccgaataggacatttcctagtttgacaacagagctaggcacagcagttgcgagttgcccctcaaaggttactttgacactggttttcttttcagcattggcgataaattggataatttcttgagcgttcatttttgtagcagtcataggtgcctcctggttcgttataatgatacctattctaccaaaaaaggcctcaaatttgaaacctttttgtctgtttttaggtatgattttttagggatgtgagataaaacgtgctgtcggtaaaagcaagcccctaccgatacaacctaaaaacactcttcacaactatctccccgtgttttattgactattccagtatagcacacttttagaattaagaaaagactttttatctactttctttcgcttcttctatagacaaaaatatcatgggtaaaataatcaaggctatagctagaaggagggaccaatccactactaatcctaagaacaaaacactcaagagagcagaagagagaggttcactggcactgataacggcaaccaccaaaggagaaaccaaggacacagccttcatggaaatgaaaaaagcaaaagccgttccaaagaaagcgataatgaggcaaatcaagatactccaaatatcaagagtaaaggaaagctgataaaccggcgagaggacattgctaaacaaacctgccaaaatcatcccccacccaaccgtaggaacaaaaccataacgcttagcaaaaggttggggcaagataacattaaacataacacccatggcactcagcaaacctgttataagagctagcggcgtcatggataactgagagaggtctccctttgtcgccatcaagcaaacacccagcatggcaaccaaaacatagaaaacagcgctttttgacgctcgtttttgataaaccaagcgattgtaaaagaggataaagacagggctaataaactgtaaaatagttgctgtcgtagcatttgagtattctacacagagatagaaaaaatactgaactgaaaaaatccccaaaatagcataggctaaaaagggcaggtaatttttcttgtctcgccaaatatctagcacttgcgattttaattgtattgcagaccaaatgagtacaagactccctgccagtgtcaaacgcatagaggtaatccagcccgaagacacctgataatgagtaaagaagtactctcctaaaattccacagattccccatattaagccggataggagcgaataaatttttccgttaacaatctttttctgatactgattcatacccttattgtaacacgaaaggaaaaaagtggcaatccattgattggccacttcatttagagaattatcgtctcgcccttgaagaagaaggtcgtgtagtacttgagttactgctatcgctagaactactacttgaactgctggagctggatggagttggtagactccccacaatactagaccaagcattctgataatccgcatcacttccgccaatagcaaagcgataacttgtcgctggcgctcctgacttattagcccaatagctggtaacagtcgaacctgtgacctctacttcttttccttcaacagaaaccttctctggtttttgacctgttgatttcaagacttccgatttcactacactaggatctaaagcaaagcgctcgttcccccaaatgcttggggaagcttgctgaatcgcatttaccagatgagccatgtaattagagttattagaataacctgctctacgtgacaatgaatgattatcatcatgcccaatccagccacctagggttaatctaggtgtcgaaagcatgagccacatattttcgtcttggttggttgtaccagtcttcccaatccaatctgcattagccagagtaggatttaaagaagtcaggttagacttgaaggttgttgtcacacgagaggatagaacttctcgtagcaatccctgcataatcgtcgcagtagcttttgaatagacttgaaccggtttatcctgatactcatacaccactctaccatctgctgcttcaatctttgaaatcacatgcttctgatgataaactccattattagctaaggtctgatagccattggtatgctgggcaactgtgacttcaataccaccacccattggcaagctctcaataccgtactcaggaatctcgtaacccatcttttccatataacccttgacatcaacacccttttcacggagcatacgataggtccagtaagcagggatattccatgaatagttcagagcttctcccaaggtcatcattcctgttcccttgctattagcatacataatcggattgccattagcaaagtttgttggatagttagatagaatcgtttcacttcccatcaagccctggtcaatagcaataccgtaggccagcaagggcttggtagtagaagctggcgaacgtttggtatcaaaggcatgattattttgattttcttgataattacgaccacctacaaagcctagaatagcacctgtttggttatccatcaagacattccctacttctacacgacctgttccatcgtctaaaagatagccataatcagcaaccgcactttgcatggcagaatgaattttctgatctatggtagtagtaatcttataaccaccattttcaatttccttggctgccaaatctcgataaaacttctgagttgcctcatttttcaactccttagcggagacattgtctctctgagctagatagtcatacatacgttcttgagcttctgccaaagttgtaaagtataaatagtctcgtgaaattcctgtaaccgtgcccgatggtaaaaagtcctgtttaaggtcataatccttgtactgagaatactcgtctttgcttaatgcacctgtacgatacatactgtaaagaactgccttagcccgtcttaagccaatttctaggtcttcatcactcttcaactccccagtattttcataaggagagtaagtaatgggactctgtggaagtcctgctaaaaatgctgcttgaggaacagtcaactgactggcatctacaccgaaaattccctcagctgcttgccgagcccctgcaatattctgtcccttattatttcggccaaagggagccacattgagataggtcgttaaaatctcatctttattcatggcgcgttccaaggcaagagcatccacaatctctgccgccttacgagccaaggtcggcgcatccccaaccacctgctgtttaattagttgctgggtcaaggttgaacccccactagaggaacccaaacctacaaatttccccaaggtcgcacgaatcaccgccttgggtactacacccttatgttctttaaagtgttcatcttctgtcgcaatgatagccttcttcagattttccgaaatttgctcagatgagatagaagtgcgcaacaaatcactctctatggaagcaatcaccgtcccgtccgaataggtaatctctgaaatagaagagatgtccttgacctgattcaccaattcttctgtctgaggcacccgaaccttgtcaaataaggccactccgtatcccaaagcaatcccagctcccaacattcctcctagaaaaccgagtacaaagagtaagttaaataaggcttttatactcagtaaaatagctgggaaaatgactgacttatctaaggttttagattttttggtacttgaacctttcttgccaggtctagctgattttttatttttttgtttttgctggaaaaattccagcatttttcgttttaattcatttaattgattttgcatggatttcctcactttatctattataccacaaaagggaaattttcaataaaatagccactttcttccctattctgctaggctattgcccaagtttgtgatacaataggtagaaacaataattttaaaaaggagaaaaaacacatgcacatttttgatgagctaaaagagcgtggtttgatatttcaaacgactgatgaagaagctttgcgtaaagccctagaagaaggtcaagtttcttattatactggctacgatccaactgctgacagccttcacctaggccaccttgtcgcaatcttgacaagtcgtcgcttgcaactagcaggtcacaaaccttatgcgctcgttggcggtgctacaggtctcatcggagatccgtccttcaaagatgctgaacgtagtctccaaacaaaagacacagtagatggctgggtcaagtctatccaaggacaactttctcgttttcttgactttgaaaatggcgaaaacaaggctgtcatggtcaacaactacgactggtttggcagcatcagcttcattgacttcctccgtgatattggaaaatacttcacggtcaactacatgatgagtaaggaatctgttaaaaaacggatcgaaacaggaatttcttacactgagttcgcttaccaaatcatgcaagggtatgacttcttcgtccttaaccaagaccataatgtcactcttcaaatcggtggttctgaccagtggggaaatatgacagctggtaccgaattgcttcgtcgtaaggcggacaagactggtcacgttatcactgttccactaatcacagatgcaactggtaagaaatttggtaaatcagaaggaaatgccgtctggctcaatcccgaaaagacttctccatacgaaatgtaccaattctggatgaacgtgatggacgctgacgctgttcgcttcttgaaaatctttactttcttgtcacttgatgagattgaagatattcgtaaacaatttgaagcagcgccacacgaacgcttggctcaaaaagtcttggctcgtgaagttgttacacttgttcacggagaagaagcctacaaagaagcacttaacatcactgagcaactctttgcaggaaacatcaaaaacctttctgtcaaagagctcaaacaaggacttcgtggtgtgcccaactaccaagtacaggcagacgaaaacaacaatatcgtggaactgctcgtctcatctggtatagttaactcaaaacgccaagcccgtgaagacgtccaaaacggagccatctacgtaaacggcgaccgcatccaagagcttgactatgtcttgagtgacgctgataagttagagaatgaactgactgttatccgtcgtgggaagaaaaaatactttgtattgacttactaaactattcaacatttatctataaacaaaggagttaacctcgagaaaggtaactcctttttgctgttaataactctcatctatctatttttaatagacaggctacgcaggacaatgcgcaaggttgttagattatgtaagatagagagatttgaaggactgaaccaattaaataagccaaagccaatcaaactactatttacgacaacggtatcctgaatatttttcttgatgagtgtttgcaaagatgatgataacgaatccaactcttggaagaaatccaaacgattatctaacaataagatatcactcatctgcttagaaatatctgcactctcattcatcaccacaccgatatctgatagagttaaagccgctgagtcattcaatccatctccaaccatcaaaatagtgtgacctgctttctgcagtttctctactaactcaaatttcccatcaggtttcaagtctgtatagacctgatcaaagggcaaatctttgactaattcctctgtcctaatcaaggtgtctcctgttgccagaatcaattttttcccctgtgccttaagtttatccaaggctgtttttgcttcttttctcaaaggagtatgaatgcagaacattccaatcaattcattttgataagccaagaataagagattgtagtgactcttgtactcttcaattaaagcattttgttctgaactgatatgaatctgctcatcctgcatcaagacataattcccaataagaactggttggccatctatatgagatttgatccccttgcttgcgatatattggagtttcccatgcatttcctcatgttcaattccctctatctcagcttgcttgacgatggcattagcaataggatgataaatgtgttcctcaagacaggcactgattctgagaatatcttcctcactatagtctccaaaaggtaacaccttttcaactataggataactagttgtgattgttcctgtcttatcaaacaagaaagtatcaacttccagatatttctccagaacatctccatccttaatcaccatttcacggttcaacccttccttgataactgtcaaataagctacaggagtagagattttcaaagcgcaggagaaatcgaccaataggaaagaaatagccttagaaaaagaacctgtcaataggtaagtcagcccagcccccaagaaattatatttgacgactttatccgccatcttgatgaaatagcgttgtttcgttttcttgttttcttcagatttcttcatcaactcaatcagctgtaaaatacggctgttcatctgattatctgttacacgaatgcgtaactctccagtttctaatactgtatttgcacaaaccaaatcagactctcttttttcaactggaaaactctctcctgtcaaggaactttcgttgaccatacctaaacctgaaactacttgtccatcaaacagaatttcatttccttgagataagatcaagacatctcctatttgaacatcggaactcttgatactaacaaccgtatcgccctgtactaggaatacatcgctctcttttgcaagaagactctgttctaaatctgttgcagtttttttcaaggaccactgatctaaatgattccccaaatcaagcataaacatgatattgctagctgtcttggattggttcataaacaaagacaataaaatagccgaacagtccaagacttccatcgttagttccttacgcgctagtgtttgataggcttctctaatataacccaaagcctgataacaagtccatatatagcgaataggatacggcacaaaactacgaaaaagtacacgcttaaccgctgcacctgaaacaatagaataagcactctcttctctacgaatgggaagagtcatcaactcagaaactttccctttatcaattctttttaaaaaggcttctgcattatctaatacagaaaagccttcttttatgcgtagagtaaagtgctgttgatccatgtaaaactggatagactcaatccccttttcatctctcgccaaggaacgaagatagtcttgaatatccaaggtaagtgaaaaagaagatgatagtcggatatgttggtatcctctatgtagcactttaaaagacatattattcacctataaggctatctaattgctcttcttttttctcttgctcgtacaaatatttggcatcttgcaagacatcgtctccatgttgcttcacaacagaaacagatgcatctagctcgtctttcaacttgtaagccttagccaaagctttagaataaccttttttagcttccttacttgctaagattttcaaaccaagggtaccaaatgcgacaccacccaaaaataatgaagattttttcgcaacttttgcaacggttaatacttcttttaacatacttatttcctccttatcattattatatagcaatttagatataaaagcaatttcattctataaattggagaattagttttatttctactgaatctcccatctacttattcctaaagttgctttcatttgcctcttttgatacacttaaactatgaatacaaatctcaagcccaaacttcagcgttttgcttctgcgactgcctttgcctgtcctatctgtcaagaaaatctgactctgttagagactaatttcaagtgctgcaaccgtcattcttttgacttggcgaaatttggctatgtcaatctagtccctcaaatcaagcaatctgctaactacgacaaggaaaattttcaaaaccgtcaacaaatcctagaagccggcttttaccaagctatcttagatgctgtatctgacttgcttgcaagctcaaaaactaccacaacaattttggatatcggttgtggtgaaggattctattctcgcaaactacaagaaagtcactctgaaaaaactttctatgcctttgacatctccaaagattcagtccaaatcgctgctaaaagtgaacccaactgggcagtcaattggttcgttggcgacttggcacgacttcctataaagacgctaacatggatattctgcttgatatcttctcacctgccaactatggagaatttcgtcgcgttttatccaaagacggtatcttgataaaggttatcccaactgaaaatcacctcaaagaaatccgtcaaagagtacaggaccagctgacaaacaaggagtattctaaccaagatatcaaggagcatttccaggaacactttaccatcctatctagtcaaactgcctctctgactaagactatcacagcagaacaactccaagccctactcagtatgactcctctcctctttcacgttgaccagagcaaaattgactggagcaaactgacagagattaccatcgaagcagagattttggttgggaaagcattctaatactcttcaaaccacgtcaacgtcgccttgccgtacgtatggttactgacttcgtcagtttcatctacaacctcaaaaccatgttttgagctgacttcgtcagttttatctgcaacctcaaagctgtactttgagcaacctacggctagtttactctttgattttcattgagtataaactagacttcgcaaaagtagaaaacttaccgaaaatcttcaatatgacaaaaacgtataagaacaggtacacaaaccttaatcttatgcgttttgttatagtttccatacacattaaggggaaatagttgaaatcagttcttttaataaccattgaataccatatactacatttaccccaaatatgatataggccgtataaatcaagtatttcgatttttcccgcctcaaagaatagatcttatacaaaataaataaatttaaaataataaataatagagacaaaatcttcctccaaaataaatcctaaaagtacacagtcaagcatagctctaatctttattttcgattcgatataacaaacttatcaatgaatagtaagtgatataaggccagtaccagaccccaaacgctaccacgaaaagagaattcttgatgattgagagtaaacaaatcatggttaccaatatagaggcaggtcaaaataacaaataaaatccaaaataaatccgtccatttatattttgaaaaatatttttttaacataatagcatatttttttgactataataacagtatatgataaaatgtaagcagatgcaaataaaaaggagaaaagctcatgaacaaattaatgaaatttatttcggtttttttgacgtcaattgtgttaattgtatcagcgattccaagtgtttcagctgtatacgcttctgaacaagtatcacaaattgaaacaaatatggaacttcaacctgtcacttctctaacagaagaacaaatcaatacacttgcaaacgaaatccaatcttttcatccagacgtctcacaacaatggatcaaagaagtaattaaccgacaattacaaggcgattatacaatcccacctacatactctccatttagagcagtttggcaaggtattacagttaatcaaatgggtgctctattagatactgcaatagctttagcattaggaggaactactgcaggccttgcaaatctaattaaagtaaaaggaaaacatgcagcaaaaagtgctattcgttcagcaatttctagatatctaggtagttggtttgtaaatgatgttgctttagaattcgctatgaatttattatcaccggggacttatttagcacaattatgggataaaaatgatgccattcctaacaacggaaggattaacttttaatcatgagatatacaataaaattaattgggtataacgtattttcgttgtttatattctttatcttatcaatgttgtttaaagttccctttaggtggtggatcagcattgcaatgacgacttcgtcgtacattgtatataattacttaaagaaaaagagagaaaaggaatgatcttataccagatcattccttttctgctttctgtaaacccctcggagtgtgtttggcgctttgatacgaagtgtcaaagctgtataaacgttactatttccaaaaaagtaacagaaaattcctgctttgtaggactgctttgggtgagtaatagacatgtcgactcaccctatctcctgatggcgaaaagaatttagcaatggtgcaagttgttctgaactcgagaaaaaacatgccgaaatcgaagaaaagcgtgcagaacttgaagcgaagaagcaagaaatgttgaatcgcttggataaatagaatttagaaaacagaaaaaactaaaaagaatgtagggtttatttccctacattcttaaaataacttagtacataaatgacaatgctgccactgccgtcaatattgcaaaaactattttccaaatttttttattttttccaaaaatcttatcaggtaacaagcttattacaagaaaggtaataaacaacaccaatttaagtgtgtatatcataaaaacaccttctttcctacaattatattataatactttatgtaagcgaatataatagatatgaggtaaccaactacgaaaaaatataaggctgaggacagtaaaaaccagcatttaaagccttcactgtatctaggatttccctatttttagacaagattgacccaaatctacatcattaaaaaagcgaatttcaatcgaaactcgcttttttacaaaatgtattagtataaatttgtatcttatactcaatgaaaatcaaagagcaaactaggaagctagccgcagttgctcaaagcactgctttgaggttgcagataaagctgacgtggtttgaagagattttcgaagagtattagttcaagtgccagatgtcttcgttatactgagcgattgtacggtcagatgagaagaatcctgctttagaaatgttaacgatgactttatccaaccatgcgtcacggtcttcgtagtcagcaagcatttgctctttgactttgatgtagtcttccaaatcaagaagagtcatgaaccagtctttgttgatcaattcattgtaaaaacgttccaagcgctctttgtttccagctgcaagaactgcatcactaacgatgaagtcaaccaatggtttgatagcttcacgagcgtagaattcgcttgatttgtaagctgcttttgcgtaaaggtcgataacagtttctgaatcttcaccgaagatgtagatgttttcttctccaaccaactcagcgatttccacgttagcaccgtccatagtaccaagtgtcaaagctccgttcaacatgaatttcatgttaccagtacctgaagcttctttagaagcaagtgagatttgttctgagatatcacatgctgggataaggaaacttgctgcagtaacgttgtagttttcaaccataactacttgcaagtgtggagctactgctggatcgttagcaataacttctgacatgcaaaggattaaatggataatgtcttgagcgattgtgtaggctggagctgctttaccaccaaagaagattgtgattggacgagcagggatgttaccagctttgatgtcaaggtatttgtggatcacgtacaaagcgttcatttgttggcgtttgtactcgtgaagacgtttgatttggatatcaaagatagaatttggattgatttccacaccttggtgttctttcaagtgacgagccaatttacgtttgttgtgagccttgatgctttccaatttttctttgacaactgctttgtcttcataagacaaaagtttttcaagctcatctgcttcatggtgccaaccatctccaagaatctcatccaagtagtgagacaatcttgggttagcatgcataagccaacgacggaaagtgataccgtttgttttgttgttgaacttttctgggtaaaggtcgtagaaggctttcaactcagaatttttcaagatttcagtatggagtgctgcaaccccgttaacactgtatccgtagtggatatccatgtgagccatgtgaacacgtccgctctcatcgatgatttgaacagctggatctttgtactctgccttcacacgacggtccaattcttcgatgattggtaccaagtgaggaaccacttcttgcaagaattcaagaggccatttttcaagcgcttcagcaaggattgtgtggttagtgtaggcagtcatgctacgaacaattgagattgcttcgtcaagatcgataccacgtgcagtcaaaagacgaatcaattcaggaatcaccattgatgggtgagtatcgttgatttggacaactgcgtagtcagcaaggtcatgcaagttgcttcctttttcgattgcttcgtcgatgatcaattgcgcaccgtttgaaaccatgaagtattgttggaagatacggagcaattcaccttgacggtcactatcatctgggtaaaggaagagagttaagttgcgagcgatatctgtcttgtcaaagttgataccatctttaataatagaagaatcaactgaatccaagtcaaacaaacgcaagcggtttttagtcgctgtttcataaccagtaacatcaatatcgtaaagagttgatgtcaaagtaaagtctgcaaatggtacttggtagctacggcttgagcgaaccaaccagttttgctctgtcaaccatgcatttggaattgtttcttgttggttgtttttaagaacttgttggaaaagaccaaagtggtagttaagaccaacaccgtcaccattcaaaccaagagtagcaattgagtcgataaagcaggcagccaaacgtcccaaaccaccattaccaagagatggttccaattcaacttcttcaacttcgatcaagtctttacctgcagctgcaagttcttttttaacatcgtcgtaaagaccaaggttaatcaagttgtttgacaagagtttaccaatcaagaactcagctgagatgtagtaaacttttttcttaccagtgttgactggtttttggctgcttgcaagcttgctgtagttaagaagagcaaggtaaagctcttcattgctacattctgcaatggttttattgtaacgattttgtacaaattcttgtagtgataacatgtttagttgtctcctgattattgtcttatttctttaaatctaccaaattttcattaattcggcgataaattgttgtcaagtcaagcaaaccttcctcgacagctggtgtcaattgatcttcagtcatacgccaagaccagtttccaccaagggtagatgggaagttcatacgagctgcctcatccaattctagtaaatcttgcatagttgcaattgccataaagctaactgatgaaaatactgtacgaagcatagcgtgtaccactgtttcgtattctttacggttcgtgtaacgagccatgtactcacgagtcgcatcatcaatctcattacggtaccaaccaagaaccgtattgttatcgtgtgttcctgtgtacataactgagttagcaggtgccaagtgtgggctatcaatgctttcgtcttctgggttgaaggcaaattgaagaatcttcattcctgggaagccagtacgttcacgcaattcgatcacttcatctgtcatgaagccaaggtcttctgcgatgatgtttagctcaccaagttcttccttaacggctgcaaaaagcttgtaacctggacctttcacccactcaccaggtgctgctgtatcggaaccagcagggatttcccagtaagattcgaagccacggaagtggtcgatacgaacgatatcgtagattttgaagctttcacgcaagcgttcaatccaccatttgtagccgtctttgtccattgcttcccagtcatagattggattaccccaaagctgaccagttacagaaaactcatctggtgggcatcctgcgatacaagtagccttaccattgacatctgttttgaagagatgtggatttgcccacatatcacttgaatcttccgctacgtagattggcatgtccccaacgatttcgatgtggttgtcgttagcgtaagctttcaatttcaaccattgttggaagaagaagtattgagtcacacggtggtaaaccaacttgtctgccaattgctcacgatagctttcaagtgctgaagctttacgagcacgagcatctgcatctggccattcagtccaagcaagattgtcaaaatactctttgatagccatatactcagcaaagagctcaagccatgattggttgtcttgagcaaatttctcaaaatctttaacatctccgacttcaaagaaacgtttcaccgctttttctaaaagaggacgacgtgcatagtagattttagcatagtcaacttcagacgcatcgctaccaaagtcaactccttcaaggtcacttgcttccaacaaaccttgctccaccaagatatctaaatcgataaaatgagtgtttcctgcgaaggctgagaaagattggtaaggagaatccccgtaactagttgctcctaatggaaggatttgccagtaacgttgttttgtacggaccaagaaatcaacgaagtcgtaagcactttgaccaaatgatccgattccgtaagctcctggaagagaagagatgtgcatcaacacaccactttgacgttttttcataatagcacctcgtgtgttaaaataatggaacgttgcgtatttttcagacgcaaacgtttgcgttacttataagtatactccttttcaagcataattgcaagcgtttttaaaaaacttttttgattatttttaaggagactaactcattttagcaaagataacttaaaactatctaatcctaaagtttgactctcacgagacagtatacaaagtacaaaacctccttagggagcttgaatttatatgcaacaaagcacaaacgtctatagaaaatagatatagattagaaataggaaggtagcccctcctgatttccctctttagacagatttcatatatttttattaaaaatactgtattcttatctatttcatacttttcttctattaaaatgcaaaattatgctatcaaatcaagcttaaaaattttttaaaatttttacaaaaaatacttgcaaccgttttctatttgtgctatactaagctcataaaggaaaacgtttgcgtttccttatcaataaaacttgctattctttaggaggaatacactatgtcatctaaatttatgaagagcgctgcggtgcttggaactgctacacttgctagcttgcttttggtagcttgcggaagcaaaactgctgataagcctgctgattctggttcatctgaagtcaaagaactcactgtatatgtagacgagggatataagagctatattgaagaggttgctaaagcttatgaaaaagaagctggagtaaaagtcactcttaaaactggtgatgctctaggaggtcttgataaactttctcttgacaaccaatctggtaatgtccctgatgttatgatggctccatacgaccgtgtaggtagccttggttctgacggacaactttcagaagtgaaattgagcgatggtgctaaaacagacgacacaactaaatctcttgtaacagctgctaatggtaaagtttacggtgctcctgccgttatcgagtcacttgttatgtactacaacaaagacttggtgaaagatgctccaaaaacatttgctgacttggaaaaccttgctaaagatagcaaatacgcattcgctggtgaagatggtaaaactactgccttcctagctgactggacaaacttctactatacatatggacttcttgccggtaacggtgcttacgtctttggccaaaacggtaaagacgctaaagacatcggtcttgcaaacgacggttctatcgtaggtatcaactacgctaaatcttggtacgaaaaatggcctaaaggtatgcaagatacagaaggtgctggaaacttaatccaaactcaattccaagaaggtaaaacagctgctatcatcgacggaccttggaaagctcaagcctttaaagatgctaaagtaaactacggagttgcaactatcccaactcttccaaatggaaaagaatatgctgcattcggtggtggtaaagcttgggtcattcctcaagccgttaagaaccttgaagcttctcaaaaatttgtagacttccttgttgcaactgaacaacaaaaagtattatatgataagactaacgaaatcccagctaatactgaggctcgttcatacgctgaaggtaaaaacgatgagttgacaacagctgttatcaaacagttcaagaacactcaaccactgccaaacatctctcaaatgtctgcagtttgggatccagcgaaaaatatgctctttgatgctgtaagtggtcaaaaagatgctaaaacagctgctaacgatgctgtaacattgatcaaagaaacaatcaaacaaaaatttggtgaataaaaaatttgttcaaggggggtggaaatcaaatccccctttgaatttatcaatagagacacaaataatttagctttcttataaaaaagtagtatcctatgaaaggagttaatatggaaaagcaacaacctagtaaagcagccctgctgtctatcattcctgggttaggacagatttacaataaacaaaaagccaaaggttttatcttccttggtgtaaccatcgtatttgtcctttacttcctagcacttgcaacccctgaattgagcaacctcatcactcttggtgacaaaccaggtcgtgataattccctctttatgctgattcgtggtgccttccatctaatctttgtaatcgtttatgtactcttttatttctcaaatatcaaagatgcacatacgattgcaaaacgcattaacaatggaattccagttccacgcacactcaaagacatgatcaaagggatttatgaaaatggcttcccttacctcttgatcattccatcttatgttgccatgaccttcgcgattatcttcccagttatcgtaaccttgatgatcgcctttaccaactacgacttccaacacttgccaccaaacaagttgttggactgggttggtttgaccaactttacaaacatttggagcttgagtaccttccgttctgcctttggttctgttctttcttggactatcatttgggctttggcagcttctactttacaaatcgtaattggtatcttcacagctatcattgccaaccaaccatttatcaaaggaaaacgtatctttggtgttattttccttcttccttgggctgtcccagccttcatcactatcttgacattctcaaacatgtttaacgatagtgtcggtgctatcaacactcaagtattgccaatcttggctaaattccttcctttccttgatggagctcttattccttggaaaacagacccaacttggactaagattgccttgattatgatgcaaggttggctcggattcccatacatctacgttctgaccttgggtatcttgcaatctattcctaacgacctttacgaagcagcttatattgacggtgccaacgcttggcaaaaattccgcaacatcactttcccaatgattttggctgttgcggcacctactttgattagccaatacaccttcaactttaacaacttctctatcatgtacctcttcaatggtggaggacctggtagtgtcggaggtggagctggttcaaccgatatcttgatctcatggatctaccgtttgacaacaggtacatctcctcaatactcaatggcggcagctgttaccttgattatctctatcattgtcatctcaatctctatgatcgcattcaagaaactacacgcatttgatatggaggacgtctaagatgaataactcaattaaactcaaacgtagactgactcaaagccttacttacctttacctgattggtctatcaattgtaattatctatccactgttgattaccattatgtcagcctttaaagcaggtaacgtctcagcctttaaactagatactaatatcgacctcaattttgataactttaaaggcctcttcactgaaaccttgtacggtacttggtacctcaacactttgattatcgccttaattaccatggctgttcaaacaagtatcatcgtacttgctggttatgcttacagccgttacaacttcttggctcgtaaacaaagtttggtcttcttcttgatcatccaaatggtgccaactatggccgctttgacagccttcttcgttatggcgcttatgttgaacgcccttaaccacaactggttcctcatcttcctctacgttggtggtggtatcccgatgaatgcttggctcatgaaaggctacttcgatacagtgccaatgtctttagacgaatctgcaaaactagacggtgcaggacacttccgccgcttctggcaaattgttctaccacttgttcgcccaatggttgccgtacaagctctctgggccttcatgggacctttcggggactacatcctctctagtttcttgcttcgtgagaaagaatactttactgttgccgtaggtctccaaaccttcgttaacaatgcgaaaaacttgaagattgcctacttctcagcaggtgctatcctcatcgcccttccaatctgtattctcttcttcttcctacaaaagaactttgtttcaggacttacaagtggtggcgacaagggataatttatccccgccaccctttttcattttatactcttcgaaaatctcttcaaaccacgtcagctttatctccaacctcaaagttgtgctttgagcaacctgtggctagtttgcactttgattttcattgattattagcaattgtcactgtaaataatatccttgtagcaagcaatttttctcctagacttgaaataaagcgcatttctctatataataatactcatatagaaaacaccttttagaaagatacctatgcttccatatccattttcctatttttcaagtatttggggggttcgtaagcccctgtccaaacgtttcgagctcaactggtttcaacttctctttaccagtatcttccttatcagcttgtctatggtacccattgctatccaaaacagctcccaggagacctatccgctagaaacttttatcgataatgtctatgaacctctgacagataaggttgtccaggatctctctgaacatgctacaattgtcgatggcacattaacttatactggaacagctagtcaagccccttctgttgtgattggtccaagtcaaatcaaggaattacctaaggacttgcaactgcatttcgatacaaatgagctagtcatcagcaaggaaagcaaggaactgacccgcatctcttaccgagccattcagactgagagtttcaaaagcaaagacagcttgacccaagcaatttctaaagactggtaccaacaaaatcgtgtctatatcagcctcttcctagttctcggtgcgagcttcctctttggtttgaatttctttatcgtctctcttggagctagctttctcctttatatcaccaaaagatcacgcctcttttcatttaatacctttaaagagtgctaccattttatcttgaactgtttaggattgccgactctgattacacttattttgggattatttggccaaaatatgacaaccctgattactgtacaaaatattctttttgttctgtatctggtcactatcttttataaaacacatttccgtgatccaaattaccataaataggagatttttatgcccgttacgattaaagacgtggccaaggctgctggtgtttcgccttcaaccgtaacccgtgttattcaaaataaatcaaccattagcgacgaaacaaaaaaacgtgttcgcaaagctatgaaggaactcaactaccacccaaacctcaacgctcgtagcttggtaagcagctatactcaggttatcggattagttcttcctgatgactcagacgccttctaccagaatcctttctttccatcggttctacgtggcatctctcaagtcgcatctgaaaaccactatgccattcagatagcaacagggaaagatgagaaggagcgtctcaacgctatttcacaaatggtctacggcaagcgtgtagatgggctaatttttctctatgcccaagaagaagaccctctcgtaaaactcgtcgcagaagaacagttccccttccttatcttaggtaaatctctatctcctttcatcccacttgtcgacaacgacaatgttcaagctggttttgatgcgactgaatatttcatcaaaaaaggctgcaaacgcattgcctttatcggaggaagtaaaaagctcttcgtgaccaaagaccgtttaacaggctatgaacaggcgcttaaacattacaaacttaccactgacaacaatcgcatctactttgccgacgagtttctggaagaaaagggctataaatttagcaagcgattattcaagcacgatccacaaattgatgctatcatcacaaccgatagcctcctagctgaaggtgtttgtaactatattgccaaacaccagctggatgtccctgttctcagctttgactcggttaatcccaagctcaacttggcagcctatgtcgatatcaatagtttagagcttggtcgtgtttcccttgaaactattctccagattattaatgataataaaaacaataaacaaatttgttaccgtcaattgatcgcccacaaaattatcgaaaaataagagactgggcaaaaagtcgttaaaagcaaaaacgcatactatcaggtattgaaaaaacttgatactatgcgttttattgtgggaagatttacttccttttctactgaaattgagtcttttcccaagatctttttatactcaatgaaaatcaaagtgcaaactaggaagctagccgcaggttgctcaaaacactgttttgaggttgtagatgaaactgacgaagtcagtaaccatacctacggcaaggtgaagctgacgtggtttgaagagattttcgaagagtattaatcactaattatctatctcaacaaatcttcctagaatatgaacattttccgagacagagacaaaggagcttggatccacttgtgtcataatctgtttaaattcattaaactctgcacgtgtaatgacagtgattaaaactgcctttctctcgtgattataggttccttctgcatcgtggatcatggttgctccgcggtgcaattttttatggattttttcaattaccttctctggatgatttgtcacaatcatggcctgcatacgcttttgcttagtaaagactgcgtctgtcacacggctagagacaaagatggtaatcatagaataaagagcgtatttccaaccaaaggtcaaacctgctatcagcatgatagttccatttaccaagaaagaaatactaccgacattcttacccgttttcttacgaatagtcaggctgacgatatccgtcccaccactggagatattgtttcgaagagcaaaaccaatccccaaacccataacaacacccccaaaaagggaattgataatgggatcctctgtcaaggttgccacagggacaaactggataaagaaggaactcatagataccgtgataaaggtaaagacggtgaacttatggccaatctgataccaagctaagaccatcaaagggaagttaatggcgtagaagcttagcgaaatcggaatatgaaaaccaaaccagtgattactcaaggcagagataatctgtgccagacctgttgcaccactcgaatacacatgccctggttggaaaaagaaattaactgctactgctgataaaaaaccatagaccagagaggccgaaatcttctcatcatacttttctcgagagatactttgtaagacacgtaaaatttttatctgataagcaaagcggcgcagataatagcgccaccgcttaattcgttttgtttgtttcatcttcttctacttgtaagctgagttcctctagttgtttgagagcgactgttgatggagcttgtgtcattgggtcagttgccttgttgttcttaggaaaggcaatgacttcacggatattttcttctccagcaagcaacatgacaaaacggtcaagcccgatagccaaaccaccgtgtggtgggaaaccatagtccatggcttcaagaaggaaaccaaactggtcattggcttcttcagttgagaaaccaagagccttgaacatgcgttcttgaaggtctttttggttgatacgaaggctaccaccaccaagctcataaccgttcaagacgatatcgtaagcaatggcacgaaccttagccaaatcaccttctaattcatgagcagtctcttcctgtggaagtgtgaaaggatggtgggcgctcatgtagcggccttcttcttcagaccattcaaacatcggccagtcaaccacccaaaggaagttgaacttatcattatcaatcaagccaagctctttagcaatacgtccacgaagggcacccagtgttgcattagccacttcaagcgtatccgccacaaagagaaccaagtccttatcttcaagaacaagcgctgttgtcaattcttcttggataccagtcaagaacttggcaactggtccgtttaattctccatcaaccaccttgacccaagcaagacctttggcaccatactgtttggctacttccgtcatcttgtcgatgtctttacgtgaatagttgtccgcagctcctgtgaccacaatcgcttttacagcaggtgcttctgaaaagactttaaagtctacacctcggaccacttctgtcaagtcctgaagcaacatgtcaaaacgagtatctggcttgtcagaaccgtaaagagccatagcatcatcgtatttcatacgagggaatggtagcgttacttcgatgccttttgtttccttcatcacgcgcgcgatcaagctttctgtaatatcttggatttcttgctcagtaaggaaggacgtttccaagtcgacctgagtaaattcaggctggcggtctccacgcaagtcctcgtcacggaaacatttaacgatttggtagtaacggtcaaaaccagcattcatcaagagctgtttcgtgatttgtggactttgaggaagagcgtaaaaatgccccttattaacacgagacggcactaaataatcacgcgccccttcaggcgttgacttagaaaggaatggtgtctccacgtcgataaactccaactcatccaagtagttgcggatagagtgggtcaccttggcacgaagtttaagattttccaacatttctggacgacgaaggtcaaggtaacggtaacgcaaacgtgtatcgtcatttgcctcaatgccatccttaatctcaaatggtgttgtcttagctgtgttaagcacaataagagctgtcacgtttaactcaaccgcaccagttggcaacttatcattggcttgctcacgcgcagcgacctgaccagtcacctcaataacaaattcgctacgaaggctttcagctgttgccataacctctgcagatactttttcagggttgataaccaactgcatgattccttcacggtcacgaagatcgataaagatcaaaccaccaaggtcacgacgacggccaacccatcctttcaaggttatttcttgtccgatgtgttcctcacgaacacgaccagcatacatactacgtttcattatttctctcctcttttattctgttactattttaccataaaagcgcaggctcttcatgaaaatcatcagaaaagtttgccagtctttaaaagtcaggtgaaagccctaaaaattagcgctaatactcttcgaaaatctcttcaaaccacgtcagcgtcgccttaccgtatgtatggttactgacttcgtcagtttcatctacaacctcaaaaccatgttttgagctgacttcgtcagttctatccacaacctcaaaacagtgttttgagcaacctgcggctagcttcctagtttgctctttgattttcattgagtataatacaaaaatccgatgaacttcaccggactcttttattttgaatttttgcctgctttacgcttttcagcgatttcggctgcctttcgaggcaagacaatttccgttatgtaagccgtcccaaaacgcagtacacctgcaataggagcaaagacaactgctagatagttatagaagaaatcgcctttgaaggcataagctagcgctccaatgatgaaaaatagaacgactgcctgaatcactgctaataaaattactcgtttcatgtgacctcctgactctattatagcatgagaatcatcaaaaagccgactaaattattcaaagcgtgaagagaaatactgtagaccagaccttttctgctaatgtaagccaaacccaaactaaaaccaaggctaaaatagacaaaaaattgttgcacatcacctggaaaatgaatcaaggcaaatagaagactagataccagaagaaaaatcagggttcgtttactattgtcctgcttaggaaagagatagcgtgctaacatccctctaaaaacaatctcttccgtcaaaggagcaaaaataaccacagcaaagaatgagaaaagtggttgagacaaggtcaagtctgtcgctatttgctgatttactgaaggatcatctggcaagaagaattgaacgaccagagataagaaccaaaccaagacaggaagccaaataaatcgattaaagccgctcttctcaatatgaacaggagccttctgataccatttgtaaatgccgtacacatatactccagccaaggccacatagagtagagtaacagcatagggtgaagcgcctaaagcaagcgacgcagtcgcgagcccctgaataaagccatagataaataaaaaggatagaagggctagaagaatccagccaaggtttttaagtaatttcatagataactcctttatttgaaataacgttttaccataggtaactgcatcacattgatataaacatggatggctcctacaagcaagaaagctagtaactgaatctctcctgtcaagaaagaaatgataataagaaaaatatataaggctggtaagacatattggtgtaattggaataaaattcgaaaactctgttccaaattagcctgacgctccccttcatcataagaatttatatagttcaagacatcctttggtgtagcgaaaaattccaaatcaaactgacgaacaatcgcaatggttttaaaaagagatttttgagcgactaagaataccacaaagagtaagaaagaaaggaaaaatgtttgagggtttgtatgcaatataatcacctcacttaatgaaataaaaatagccaatggaatcgctacacctgtaatattaaaagcaatggttccaaactcaagattccgatacatttgcacataataggtttcattcagatcgtcatccatttcctcttgatacaaagaatgaaattttctgcttttctttaagaaattgaaagtcaaaaacatactaatgaaacctatcagtaaacaaatagctgatatccatggcatcaaggcttttacatctaaaataatttcgtgggattcgacacgtgccttaaacatccctacaaacatgcccaagaaccccccaagacaatagacatcaaaaataacaatctacgtttctttttcatattcattctcctttttcacttgctagatttttggatttcttttcaatccattcaattactgggatgagagcaaagtagacccaaacaaattggtcgctttgatagggattaaaccagcttaggtccatcccaatcagtagaaatacgctgactaataaagctatgaccactacataataaatcactttatacttgttcatcactcgtcctcctccaaacgaaataccgattcgactgtttcgttgaaaatttgagatattttcagggcaatgataatggatggggtgtactcatcccgttctagtaggctaatggtctgtctggaaacccctgccagtttggctaggtcggtttgattgagaccatcgcgagctcgaagctcttttagacgattttttagttgcatgttacacacctactctccgtcaaattcaacggtttggatatcctcaatacgttgcaacttgaatttttcttttcccgtattatctacacgtcgtagctttacccattcctcatcaacatccacaacttcccagttatctggcccaatatacactcccgttataattggttcctttccaatcatttcttgtaataatctcgacatttctgcgtttcctttctcttttcgctcaagtcttttgattttattctctagtttcttgatttttttagaattattagaataaaagaaaatcataaatagtataaatcctagtacccacattataactcctttctgcttcctatttcttaacttgaattcattgtaacatatctttttctttttgacaagtatagttgtcaaaaaaattatgatttttgtcattttgcaaaagaaaaaggtcaggagtaggttcctgaccactttatctatcattaatactcttctaaaatctcttcaaaccacgtcagcttcaccttgccgtaggtatggttactgacttcgtcagtttcatctacaacctcaaaaccatgttttgagctgacttcgtcagttctatccacaacctcaaaaccatgttttgagctgacttcgtcagttctatccacaacctcaaaaccatgttttgagctgacttcgtcagttctatccacaacctcaaaacagtgttttgagcaacctgcggctagcttcctagtttgctctttgatttttattgagtataaaatcctagtttttcaaagatttctgagaagttttggctgattgtctcaagtgacacttgcacttcttctcgggtttggttgttcttgaccgtcacttgtccgctttcgacttcgctctctcctagggtgatgagggtcttagccgcaaagacatcggctgacttgaactgagcttttagtttacggttgaggtaatcacgctctgctttgaaaccttgttggcgaagagcctgtaccaattccaaggccttgatatttgccccttcgcccaagactgcgatatagacatctagggcgttttcgatagggagggtcacaccttgcttttcaaggatgagaagcaggcgctctacaccaagtccaaaaccaaatccagcagtttcagggcctccaaagtaagcaaccaaaccatcgtagcgaccacccgcacagacggtcaggtcattgccctcaatctctgtgataaactcgaaaatggtgtggttgtagtagtccagaccacgcaccatattggtatcgatgatgtaatctactccaagattttccaacatctgacgcacagcatcaaaatgagcttggctttcttcatcaagaaagtccaagatagacggcgcattctctactgccaccttgtcttctttttccttagagtccaagacacgaagaggattttcctccaagcgacgttggctatccttagacaaggtctccttgagcggtgtcaaatagtcaatcaaggcttggcggtaggctgcacggctctcaggatttccaagagtgttgaggtgcaatttgacaccttgaataccgatttccttcaaaaaatgggctgccatagcgattgtttccacatcggtagctggattgctagagccaaaacactcaacaccaatctggtggaattggcgcaagcgccctgcctgtggacgctcataacggaacataggtcccatgtagtagaacttgcttggcttttgcacttctggggcgaaaagtttattttccacataggaacggacaacgggtgcagttccttctggacggagggtaatatgacggtcacccttgtcataaaaatcgtacatttccttggttacgatatccgttgtatctccgacagagcgactgataacctcgtaatgctcaaaaataggcgtgcgcacttctgcatagttgtagcgtttgaaaatctcacgggcaaagccctcaacgtactgccacttagcagactcagcaggtaaaatatcctgcgttccttttggtttttgtaatttcatagggaatcctctttaaacttaatagtcttattttaccataaatagagggattaaaacagtaagaaaaaaattaggatttagatatcatttttgagattaagaattgtcaaaaaaatagctagcaaggaaagaccaacaaatagcatccaagtcaactgtatattccatacggctactagtgaaaaacaagctgttcccacaggtatggataaggtaaacaatagacctaaaaaattactagtacgagctagaacctctggagctagatttttcatgagcatggcactaatctttggttgaactttaccagacacatacagagtaaagaagagaaatagcaaaccaagcacgacttgattgaataaattagccaaaccaactagactaagtcctacggtctcccacatcatcaatctaggcaaggactgcttcccaaaataatcattgcccgtaaggctactgatgatgactgatactaaaacacagaattgattgataaatagtgcctctgtataagaaaaattcaagagagaatggctcaaaaagaagatattataaattccacccaaagcgccacccaaggaattaataagcaagacagcaaagagcataaaaccaaagtttttctgtccacttttaagaaaaacgagacgtaaatttcggtaaattgttaggaactggtctttgatagaaagcttctcattttttaagttttcaccatcagcagatgacattgacaggctcaatttgctttttcctaaaaagaggatagtggctgatactaggaaaaagcaggcattgattcccgcaacgagagaaaaattgttgaccgatagagctaagagccagactccgaaagcttgaccaccaatagctgaaatataggtgatgaactgtgaaaaagaataagcctccatcagatcatcttcagctactttttccttaataagaggcatacgcaggccacctgcaaaatcactgatgatatcactaatgacattgatcaaacacaggctagaaaaggcaaagagactagcttgctgaacaactagggctgctagaaaaaatagaaccgcctgaaacaaaccgctatagaccatccatttgaccttgtccctcgtgtaatctgcccgaatccctgcaaaaactgtaaagagggtcggaagaatcatgacaatattcgccatagcaacagcaaaagatgcttgtgacaaggtcgatgcatagacgataaagaccaggttgaaaatcgaaacaccaaaagcattgaagaagcgtgataaagtcaaaattctataagctggatttctaaacaatagtttcatagataatctccctccttgttctaagttctacatcaagaatagctttagtatagcacttatgaatttgcgaaacgattcttttgaatatatgcaacaaacaaaatgagcaaaaaaacgatagaacttttgtaatgacctgagagagggcaacagttctatcgcttcaaattttttcttggtttgcagatattcaagaatcgggagtttttctatagtattcggcagatttattacagccaagcatctcaaaaatacggacagcatcctccatctttttctggccttccttgactctaccttgcttgctatcaaggagaccttctgcccacagataaacaattcggaaataggtctcattttccttgtagaaatgctcttcgataacacgtttaaaataataggcattggtaaattcttcacactcaatactagctaaaaagccattcaatagtatagtatgaaaaaggtttcgattgccagacatttccattagaaaatcagatttacgtaccatttctcgtacatatctagtaaaaagagaaacagataaaaatggagaactgactgaaaataaattgagttcatagattccccagatctcggtagaaaacaaataatcatgaaggacttttccttcctctgctgttaagtctaccctttcatctatgctcttcatataagacttgataataatggcatttagaatatgtttctgtttgttgtgagaatgggcatgcttttatactccctgcgatataagtcctcaagaggtgctatattctttggttccaagacatctgtaatttcttttctcaactcagaatctgtatcatactggaaacctcttgccagaaagaggatctcctccacactggcagatatattttccagagcaaatagaaacttttccaccgaaagctcactctgacctgtttcaaaacgggacaacatagacggcgaaaattgtcctccggttgcttgtctcagtgagatatttcttgactctcgtaattgtctaaagacttttccaatctgctccatagacttccccttgattccgtattttcttcattttatcatatttttcagaaaattcatcaaaaacttgccaaattgtcagaattatgagaaaatagaggatatttatcacgtggagggactgctatgagagacgatatcaaaatcaatgaccgtgctttggccttgcaagaccaaattatcgaaaaactagagaaagtttttgatacagatgtggaattggatgtttacaatctaggtctgatttatgaaatcaatctggatgaaacggggctctgcaagattgtcatgaccttcaccgatactgcctgtgattgcgccgaaagcctgcctattgaaatcgtggcaggtctgaaacaaatcgagggtatcaaagatatcaaggttgaagttacctggtcgcctgcttggaaaatcacacgaatcagtcgctatggccgtattgcccttggactaccacctcgttaagcagaccaatcacttttaaagatgaaaatcaaagggcaaactagaaaactagccgcaggttgctcaaaacactgttttgaagttatggatagaactgacgaagtcagctcaaaacactgttttgaggttgtggatagaactgacgaagtcagctcaaaacactgttttgaggttgtggatagaactgacgaagtcagcccaaaacactgttttgaggttgtggatagaactgacgaagtcagtaaccatacctacggcaaggcgacgttgacgtgatttgaagagattttcgagtatgagtttattttttacctgacttgtccatattccagaagtctgtcacggctccgcgtgaagcagatgatacgatgtgggcatatttaccgaggacaccacggctgtaaagtggtggcaaggttgtttctgccttgcgtttttcaagttcttcttcggatacggccatagaaatttctttggtatcttggtcaaccgtaacgatatcgccggtacggagataggcaattggtccaccatcctgagcttcaggagcgatatgtccaacaaccagaccataagtaccaccagagaaacgtccgtccgtcaagagggccaccttatctccctgacctttaccaacaatcattgaagaaagtgatagcatctcaggcataccaggaccacctttaggtccaacaaaacgaacaacgactacatcgccatcaacgatttcatctgtcagaacggcctgaatcgcatcttcttctgagtcaaagaccttagctggcccaacgtgacgacgcactttaacacctgataccttggcaactgcaccgtcaggagcaaggttcccgttcaagatgataagcggaccatccgcacgttttggattttcaagtggcatgataactttttggcctggagtcaagtctgcaaagtcagccaagttttcagctacagtcttaccagtacatgtgatgcgatctccgtgaaggaaaccatttgccaacaaatacttcataaccgcagggacaccaccgacttcgtagaggtcttggaagacatactgaccagatggtttcaagtcggccaagtgaggcacacgttcttgaatcgtattgaagtcctcaagtgacaagtcaacatttgcggcatgggcaatggcgagcaagtgaagagtggcgtttgtagaaccaccgagagccatcgttacagtgatagcatcttcaaaggcttcacgagtcaagatatctgatggtttgagaccaagttccaacatcttaacaacagcacgtcctgctgcttcgatatcttctttcttatcagctgattcagctgggtgagaggatgaccctggcaaactcatccctagaacttcgatagcagttgccatggtattagcagtatacataccaccacaaccaccagggccagggcaggcattacattcaagacgtttcacgtcctcagctgtcatgtcaccgtggttccattttccgataccttcaaagacagaaaccaagtcgatatctttaccatcaagatttcccggtgcaatagttccaccataggcgaaaatagctgggatatccatattagcaatagcaatcatagatccaggcatgttcttgtcacagccaccgatagcgacgaaggcatccacgttgtgaccactcatagccgcctcgatggagtccgcgatgatgtcacgagatgttagagagaaacgcataccaggcgttcccatagcgatcccgtccgctacggtaatggttccaaactgtacaggccaagcgcctgcagatttgacaccttctttagccagtttcccgaaatcatgcaagtgaatgttacatggtgtattttccgcccaagtcgaaatcactcccacaatcgatgtttcaaagtccttatctgtcataccagtcgcacgaagcatagcacggttaggtgatttaaccatgctgtcataaatgctactgcggtgacgtttatctaattcagtcatcttatccctcccatttcagtttttactattatagcacaattttcgcatgaagaacagaataaaattcttgaattttcagaaaattctatacacatgtgaaatatttaaaattaaaaacaacaaagcggattagtgcactttctgatgaccagaatatgctttttaatccgctttctttaaataacgtactgtaatttttacagaaattctttcaaataagtgtatttaacatctatcttgcattataaatttctagaaccttctcttttatattcgattcactcaaaccatactcattaagaagataatccattttccctacttgaccgaatctttcttgaacacccatccgatgaatttttgttattccatcatcagagaataattcacataaagcactgccaattccacctatctgattgtggttttctacagtaaatatagtttttccacttaacattgtttttatctgttctggtatcggtttgattctaaataaatctatcacacctactgaataacctaatttagacagttcatctgcaactcgaatacttggagcaaccattatgccagaagcaacgattacaagatcttcaccatgccttaactcaatgtagcctttagaaaaatcttctccaccttgatacacaggaactggagcttttctaattgttcgaatatattttagtccttttaagtctaatgtctggttcaatatttcacgaaattggatatcatcagttgcttcgaaaatgattgatttaggaattaaacgtaacaatccaatttcttcaaatggcatatgtgttccaccattcatctctgccgttactcctgcatctgatccaatcacagtggcatccaattgtgcgtatccaagagaaataaataattgatcaaatactcttcgtgaagcaaaaggaccaaatgtatgaagataaggtctaaacccctgaatagacaagcctgctgcaaggccgaccatttctgcttccataatcccaacattcacataacggtctccaaagtccttttcaagattattagtagccatcgaacttgacaaatcggcttctaagactactatatcagaatcactttgattagcctctaaaaggaagtctctatatacatgccgtaattctttcgtacttctcatcattctgtttcctccaattcctgacttaatctttctacaactgaagttaacatttgtttctcctctacagtagggcgaagatgatgattggatttcatttcttccagctcttgaaccccttgacctttaatagtatctaatacaatgcacttaggtgatgaattatttgactgttttaattggacaatcccttcataaatttctctaatatctgaacccttgaccctaatggattcaaatccaaatgctgaaaatttttctacgaaatcacctggattacaaatatcctttgtaaaaccatctaattgttttttgttatcatcaacaaatacaattaagttggataactgttgatgagaagcaaactgtatagcctcccaacattgtccctcatttaactcaccatctccaacaatagcgtaagtataaaagggactctttcttattctctgaccatatgcaagtccagttgcaacactaattccttgtcctaaagagcccgttgtcatatctatgcctggcgttagatttctatcaggatgagacggtaatttggttccatttgtatttaaagaatataagaattctttgtcaaagaaaccattcaaatagagtgtactgtatagagctggtcctccgtgaccttttgataatatgaaataatctctatctcgtgctgcaaatatttctggagtcattggcattatttcaccataaagcaccgctaaaacttctacgatagacagacttcctccgtaatgtccgaatccaagatgattcaatgttctaagagtatttaatcggatgttagtcgcaaattttcttaacccatcttctctatttttacttaaaatcatcccttattcctccgttgcagatggctttttaataaaggatactccaaacataactgctagaataagaacaagaccaatcacaatgcctgcttgtgagccaaattgatttaacattcctaaaataattcctgatagaccaaaatctgcatctgagaaagttgatccttggaaaccaagtcctcccaaaactggcattaaaaagactggaagaaaactgattaaaataccttgtaaaaatgctccaatagtggctccacgaacaccaccagatgcattcccaatgacacctgcagtcgctccacagaagaaatgaggcacaacacctggtaagataacaaccgttcctgaagcaatcataattaccatacttactaaaccaccaacaaaactagagataaatccaattagaactgcattgggtgcataagtataaacaatcggacaatccaaagcaggttttgaattaggtacaagacgctctgaaatacctttaaaggctggaacaatttcgcccaaaataaggcgaacacctgctaaaataacaaatacccctgctgcaaattgacctgctaattgtaaagcataaactagaccacttgtaccactactgatttctttttctatatattctgaccctgcaaagatagctacaataatgtaaataactgccatggataaagtaatactaacagtactatcacgtaaaaaagctaaactctttggaaatttaatgtcctctgttgattttgatttgtcaccgataaggctaccagtaaaaccactcaaccaatatcccaaagaactgaaatgacctaaagctaccttgtcatttccagttaattgaaccatatatttttgcacaaatgctggggaaatactcataataataccgagtgctaatcctcctagtaagatgagaggcaagctagtaaagccagcaactgataaaatgaccgcaatcatacatgccatatatagagtgtggtgccctgttaaaaaaatatatttaaatcgagtaaaacgagcgattaagatattgaacaccatgcctgcaaacataatcattgcagtagctgagccatatgttgttaaagctacagctacaattgcttcattattcggcacaacgccagataaatgaaaagcatgctcaaacatggtaccaaatggatttaaagaattttgtacaattcctgcaccaccagatacaactaagaaaccaacaaaggtcttaattccacctttaataatatcaggtaatttcttcttctgaagaactaatcctaagattgcaattaaagctactaaaatagctggtgtactaacaatatccaatatgaacttcatcatgacgctagcctcctatataagtcctttttcttcacaaagtttagtaattaattctcgtagttcatccatatcaataatactatttaagatacgaacatctccaagatgactagctgaatcagctagatcacgaccaacaatccaaatatcagctgcatttggatctgctccacctaaatcataatgttcaacttctacatccgaaacattcaaatcactcaatacagattcaatattcatctgtaccataaaacttgaacctaatcctgaaccacaagctgtaccaatttttaacattatctaatcctcctgtttaattatcattttaatgtcatcatagttttttgatgatattaaagtttgaacatgatttttatctcttaaaattgttgttaaatgtgacaaagcctttaaatgactctcattatcaatggctgcaatacaaatcaacaatcttacctcttgttctggattatccaataaataaatcggttcttccaaaactaacattgacattcctatttcattcacaccttcatctggccgagcgtgaggaattgctactcccttccctaaattaataaaaggtccaaactcttctactttttgaatcattgcctcagggtagttctcagttatcttatcttgatccaaaagcggtttagctgctaaacgaatcgcctccttccatcctaatttttgcgaactaacctgataggtttctttggtaataagttgttctagcactggtacaatttcctttctatcatttttttggtaaagataattctttaacgccaatcttaattccaattcttgtgtaataattccatatcttttgacaatattcaggatttgttcaatctcaaaatctccatactctaaattcggaaaatcttttaacactagttctactagttgtattgcttgctcttcagtcatcataaccgaaactagataatttggcttttctgtctccacctttatggtagaaaaaaccatatcatagtcactactagctttcacctgtaaatcatcaatctttgaggttcctataaactcaatttgaggaaataatgctaatagattctcttttaacatcaatgaagaactaacaccattaggacaaatgattgctgctttataccatttttgaggcaaagtatctgctttctttaaataacctccgaaatggataacaaaatatgctgtttcactatcaggtatgggattgtcaatagcgtccatcaagggcatcaaagaatctttgactaattcaaataaatcaggataatgttctttaacatgcaatacatattcatttgaactaggtaggccgaactttaatctatagtaagccggtataaggtggcggcgaagattttctctcaatccttccctttgtttaaaatgtaacaaagaaatatcttccattctacttataatagcctctgttaattgattaaagtaaaccggagcaacatctacttcaccttcaaagcaacttgataataaaacggtgatatagcgataatcatcctcagaaaacaccgtatctataattcccaaatcaaccactgtatccaataaaatagtggttatatcttgaataacaggagatactaatgtctctgaaagacatactctttcaacatccctttgatacctacacagaatgaatactaaaccgaaaaggtaaacttttaattgattaacaataggtactagctgtagcttctcataataatctttaactacctgatcaatcaaatcataagttaatgaatacccccaactggataaaacataatccaaaccccaaatccctatggaggattccagcaactcactaaccatttgaaaagctaagcggtgcttattccactctgaaccgtgtaaagtataaccttttgctctactgtaccctagctccaaatcattatctaacataatctttcttaatgattgaatatcagataaggttgtattcttacttactttcaaaaagtcttggtaatgactattcgatataaaatctaatcggcaaaaagtgtaaagatagattaaagctaagcgagtcgactttggtaaaaccaattcatccgacttaataatatctgtcaaagactgcttcgtacgatttgataaactatagcgaccttgctttttatccagcactatccctttattagctagataaggcactaaataatctattccttctttgacttcctttataggtaagctcaccttaacagataattcatataatgatagctcacaatgatccatcaaagtcatcaaaataactagtgctctataatcaaacatttctcttcctttctaactacaattatagtgtaaaaattataagaataaaagagtatttgagcacaatataatctcaccttttaaaagaaattattgggctgaaagtttttagtgattatttttcaactttctattgactttataaattaaagtgatatcatttagatatcaaataacaggaggtcattcttatgactgaaaaactaatcaattcaaaaccaaatggtgtattcgcattgattctcattgagttgacaatcgtacttggtatctttatatttataatgggggttggttcggaaaacatttttggaattattatcggacctttactaatcgtaattgcaggtctagctcatgctggtttaaaagttgtcaaacctcaagaagctctggttctgacactctttggtaactatacaggtaccatcaaagaacctggcttttactttgtcaatcccttcagcgtagcagtcaaccctgcaaaccacactcgacttggacaaagtggtgatgttagcacaaaatctccttttttaggagctaaatcatcaaatgacaatgatgtaaatcttgaaattggcaagaaacagatttccctcaaagtcatgaccttgagcaattctcgtcaaaaaatcaatgattgcttaggaaaccctgtagaaatcggtatcgcggtaacttggagagttgtcgataccgctaaggcagtcttcaacgttgataactacaaagaatatctttcattgcaatgtgatagcgccctccgtaatattgtccgcatctatccttacgatgtgtctcctaatgtggatactacgggtgatgggcaagcagatgaaggtagtctccgtggctctagcgaaattgttgctaaccgtattcgtgaagaaatccaaagtcgtgttgaggatgctggcttggaaatccttgaagcacgtatcacttacctagcttatgctccagaaattgctgccgttatgcttcaacgccaacaagcatctgccattattgatgcacggaagatgattgtagatggtgctgtaggaatggttgaaatggcactagaacggctcaatgaaggggaattggtagaacttgacgaagaacgaaaagctgccatggtttcaaatctccttgtcgttctttgtggcaatcatgatgcacaaccaattgtcaacacaggaagcctttactaaagatggctgaagctaaaaaaaagcagatcccccttcgactctcaacaaagttatacgctgcactcgcatcatgggcagaagacgactttcgttcagtcaatgggcaaatcgaatatctcctcacagagtgtgtcaagcaacggaagaaagacggaaaatacgtatcagaaaccattgacgaaccatttgagattgatatttaacaccttctcctgtctgccgtgtcggataggagaattttttcatctttttttgtcaagtaactttactttacaaaaaaaatgtgttatcctagtatggttgatgaaaatcagtagattgaatcgaatataaatacctaaaggagaaatcaaaatggcagtacctgcacgtcgcacttcaaaagcgaagaaaaacaaacgtcgtacacactacaaagtaacagctccatctgtaaactttgacgaaactactggagattactcacgttctcaccgtgtatcacttaaaggatactacaaaggacgtaaaatcactaaagctgcatcagctgaataatagaagggagataccatgcgcgtaaatattacacttgaacacaaagaatctggtgaacgcttgtaccttacttctaaaaacaaacgtaacactccagaccgccttcaattgaagaaatactcaccaaaacttcgcaaacacgttgtgtttacagaggttaaataagcattcaatacgaatcaatacagaagaaaaacgcttgatcagcgttttttctttttgttaatttcactacattgtaagggaaatcattcgaatgactacatttttcactaccttttttgaaataagaatacggattcggacaattaaaagcaagaggaactcaaatgtaagttggggttccttttttgtatatttttcaaataacgcctctacactatttgtagcaaattcaccaactacagttgtatcttagttaaaataagttagaatatgtaagtgagtaccagatataccaagacatcgtcaccatctaaggtatattcaaaatacaaaagttgaccaactagatttctgaatatccttatatatccattcttaaaattggtttaaatagcgtagtcttttaaactagttttgagaatccaaaaaatcttcctacatatgtaagaagattttttagttcagaatgattagatttagctaatggatacctatcctacccactcaccgttagcattgactcgatagccatcgggtgtagtcgtgtttactaataaatctcctgaattataggtatagtaccatttaccagaaactgtaacccaaccagtagccattgaacctgattcatttaagtaataccataagcctttgtctttaacccaaccagtagccattgaacctgattcatttaagtagtaccataagcctttgtctttaacccaaccagtagccattgaacctgattcgtttaagtaataccataagcctttgtctttaacccaaccagtagccattgaacctgattcatttaagtagtaccataagcctttgtctttaacccaaccagtagccattgaacctgattcgtttaagtaataccataaacctttgtctttaacccaaccagtagccattgaacctgattcgtttaagtaataccataaacctttgtctttaacccaaccaactactccctgattagaattctttttaggtttagctacatcagtttcttgttttatattatctactttttcaacaatgatatcattactagtagataaatttgatttaagaacatcttttatatgttctgatgttacatagaacttaacagtttcaggaattgcaaatgtatcttttttcacagaaaactctgtacttttattcttaatatgaatttcctttaatgaatctaagacgccacttaggaagaaggacggcaatgagttgatattattaccaattgttaaactttttaattttggtaaaccgttcataacgtgtttaccaaaatttttaacattatctggtaatataagttcttttaattctaaattaccgtaaaaggctaaacgttcaatagtttctaaactatttggtaagctaatttcttcaagtttaatcgcatctgcaaatgcaaaagtaccgattttttctaaaccttcattcaattcgagttttttcaagtaagaatttttattaaacgaatatgatgcaagttcttttgtctccttaggcgttttataactttcgtcatttttttgacttggataataaattaattgggttttatcttttgaaaacaaaacaccatcaactgaggcaaacgattcatttccttcttcaacatcaacatgttttaagctagtagtgagtctaaatagattacttcctaatgttttaaccgattttggtaatgttagtttctctaaatttgataaattagcaaaagcctcatgtgatattaattctaattttgaacttgaggaaaaggttagctttttcaatttttgactaaaagaaaatgcacttgttccaatatattctagagatgcaggcaattcaatctcttctaattcagaaaaatcaaaagctctatcttcaattttctccagctgactgcctttgtcaaaaataatagttttagctttacttccatggaagccttttttttgtattttttttatgcttgatgggatagtaatagagctaggatagtagacaattctacctgtttcatctggataataactaaaagcttgactagctacttcagtaacggtaaatactttatcacctactgtgatttttgtaggaatcgtgaatggttttccatcttgaccagcttcaaactctacaggagtaactccattacccacttgaacagttcctatgttaccttctacagttagaaccttatatttgatattattttgttgaataatacttccaactttagtctctttgattacttccgaactaggagtatctgctaggattggttcattagggacatatgctgctaaaataaccgcagctgtagttaatgataatattgtagtttttttcatttaaatttccttacatatttattttctaatagatataaaattataactttgctagccgttgttataaaaagttttattcaatcattatctagtagaatagagtagtacattttataaattgtcatctctccataaacacagtatatcatttttaaattttaagtcaagaaaaattaacccactttaatttcttttttaacccgtgttaaaaaagaaattaaagtgggttaaaaaagaaattaactgagtaaaaactctcgaaattcaattcgctatattatcactcaacttgaacaaataccagaaccacaaaaaacagatgtaaaggaaaaatatggacttaaaatttgaaggggttgatttagaatacaaaaaagctaaaaacaatcttccagagtctttctgggaaacctactcagcatttgcaaatacaaatggcgggaaaataattctcgggatagatgaaaaaaacattgacacctaccaaagagtcaatagactccctgcgaaattatgaagcaagtaaacaattaactgatacacgatttaagcgtcttgttggtgttcagcgcacgacttttaaagagatgttagctgtattaaaaacagcttatcaacttaaacacgcaaaaggtggacgaaaacctaaattaagcctagaataccgcacttatgaagaaattgcggctgattttggtattcacgaaagcaacttaatccgtcggagccaatgggttgaagtaactcttgttcaaagtggtgttacgatttcaagaactcctcttagttctgaggacacggtaatgattgatgcgacggaagtaaaaatcaatcgccctaaaaaaagaattagcgaatgattctggtaaaaagaaatttcacgctatgaaggctcaagcgattgtcacaagtcaagggagaattgtttctttggatatcactgtgaactattgtcatgatatgaagttgttcaaaatgagttgcagaaatatcggacaagctggtaaaatcttggctgacagtggttatcaagggctcatgaagatatgtcctcaagcacaaacttcacgtaaatccagcaaactcaagccactaacagctgaagataaagcctataaccatgcgctatctaaggagagaagcaaggttgagaacatctttgccaaagtaaaaacgtttaaaatgttttcaacaacctatcgaaatcatcgtaaacgcttcggattacgaatgaatttgattgctggtattatcaatcatgaactaggattctagttttgcaggaagtctattgaaatactaagcctacacagactgatttcaattttaccattcttcatagtcaaaaccatcataatctggatattgttctggcgacgttccaaccgaacgtacgagataagcttcttcgtcctctgtctcgatttctctcagcacttggcattcaaaacgccattcatcaccgaagtcgaaaataaacttaaatttttgtttgacacttaggctatccagatagacattttctgtgtaacgttcttcaacatcgtcactaacaaagctacgaaagtaagaatctgcatgactccactcaacattatccatgaaaaatgcgtgagcatgatcatttgcaaaatcaaaactccataaaatcacatctgctagttccgctaacgtttttgtttttggaatctatatatgtcggtagcaaccttttttaaatttgacggaaatgatccaagcttctacagatgctggcttttcagcttctatttcttgttttactaattttaagtgtagcataatacctccaattgctcttaggaaacattcactttctgctattttatcataagtttgtctaactgtagcatttgaaaccagataattcttctgtttcacgcgaaacaccctgcgccaagcaaggtgttcttgtttttatactcaatgaaaatcaaagagcaaactaggaagctagctgcaggttgctcaaaacactgttttgaggttgcagatggaagctgacgtggtttgaagagattttcgaagaatattaagtcgtataaatcgtcgacgctgtcgcaatggtatgccactggttggctgtagttgctgcgaaatccttgtctgcgtagaagtcagtaaatggtaggatttcaacttccagctcgtcgatgcggtcaagctgaccagccagataaacctcgatacggctttctgctcgtttgatgcgttgcaagagtccgcccatacggatgtcaactgtatccaaaccaaagaccttgttttctttcagccattggtggctaaagagggcatggaagtcttcaatttggcttctaagttctggtaattcttgtctggcgatttgttgtaaactttctttatcatccgcttggtaggcctgacgaatgcgtcgtcccacatctactttgctacttaaaatagcattcaactgggcctgagtttcaaagagataggcatagtttccagctttttctttaatgttagcaagcgtctcagcagcctgagcgaagtgcggtttgtcctgttcaggtgtcatgtgttgatcaagaatcggacaaagaatatcctgataaaaaacatagcggttgggattgataccgctgagattgcctggtaggtctggtaagaggttggcaaggtcaatctgcataaaatcctcaaccgttagaccagtattggtcttgaagtgcgcagacaaaccatctaggtcattgcgatagctgagttctgcccagatttgcaagcttggtaggatagagaactgggcagtttcaccaccattgtctccccaacccgttacgatgacttctttaatctgattggcacggcaggctttattagcctcgatagccactagacggctaaaatggttgtgaggtgtaaagccaatccacttccaagctccccctgcaaatgcaaggtcatggctaatcttgtgatgattgcggaaattacggttgtatttttcctcgctatcctgataataatcccagtaaaccagagtcacacggtctttgagacggtctaggtagacacgagtttcctctggaatttccacatcacggtcgtactggccatccgctgacatgagtttgaagaacatatcactccacatctggcagtggaaaccatatttgtcagcaatatccagcacgcgctccaagtgttggcacatgaggagactacgatccacaacaccgttcagaatcaggtagcgtcccaaaccaaccaagtgggcttcgtccatcccgatattgaccttgcgagtcttcagtttagacaacgtggcaaacatgccatcaatcaagtcataaaccttttcttcgccaatgagaagaatgtcctctacatcacggagctcctgcacttccttgacaccccatttgacaaaggccgacaagtgggccaaggtctggatgcatggtacaaaggtcacgtcaaactgttgggcataggcttcgatttcctgcaactcctctgctgaataagctccacggaaatagccaaagtaaggctgcccttcaatctggtaagtgtcttccatgtaaagctcaaaggttgagtagcccatgagagccaatatctcaatcatctgcttggcagaagccacattcagcaccgcatttcgagaacagtcaaccatgtaagccaaatcttcgtaagctgcttgttcctcaatctctactttatcagcttctgctagaactgttaccaacaaggacaaggcacgataaagttggtgaggtttgcggtaggtcaattgatagtgaccttcctcaccctcgatagagatagatgcttggtcagactgagtgacagccacttccacatctggtagagaaatgtgaccttttaaaacctcaatagcttgcgtttgtttgagactaagtcctgtaaatcttaccattgcttttcctcctgtagccagttgacaagagcaccgtagagattggcatctgcgtgataggtgcaggcctggataactggtgcgaccgtgtattcttcgtaggcatcgacaaagtcttcaacagccttcttgacaccttggataaaatctggattttgactgatagagccacccagactgatgacacctggatcgatcagatactggatattgagcaagccttgcgccagattgcggttcatgcgctcaatggcttcttgacaaaggatattaccagctgcggcctcttggtaaatcttgcgaccgtcccaatcagtatgaccagatttttcaatcacgtatcgtaccatattcccagttgatgctagttgcgaccagttattaagtttttcagcaggggcaagggttgtcatgtagccaaattctccacccagaccgtggcgacctcgatgaagtctaccattgataatcatggctccgccaatccctgtcccaatcacgacacaggctgcattttcaagctctggatgagctagtagttcactgagtccaacgcagttggcatcattttctaaatggacaggtagctgataagagctaagcgcctcataccaagaaaagccatggatgtagggcaccgcactgaagccatcaatcacacctgtctcttgattgactgcacctggaacgctcatagcaatcccactgtaatcctgttctgacaagcgttgatctagccacgctagtaaatcctccaagttttcaggcgttgaaatacttgtcttatccagtattttcccatcaggagtcagactggcaaacttaatcccagtccctccgatatcaatcgttgcaatggtcattgtttttaccataaaaggggcgaatcagcagttagttcttactttttcgcccctcctttcttttgatgtttactttttgaaattaaatttcttcttttttgatgaattctgtacgaatctcttgtggagccaatagtcctgaatgaactgggtatggtcgttcaagtaggtcaaggaagagatgttgactttctggcacacgtacattttcactacacatattgtagtaacgaagcacatagccttcttcattttcagctaccttaaaggctgttggacaaacttgcggtatgctgagaacagaatggctcaagaggctaccagtcgcaaccacgcttccttcctgtctagcaagctgaaggctggtaaacggtgtctgcaaggctttggcacgacgataggctgagaagcgttcttgggcttggtggcattcaagtgcaaactcgacttcaaactcccgcaagcattgtgcttctggcgttgggaagtagccccagtcacctagctcacctgatgcacgcaaaatggtcacggcaatggtgttatccccaaggatttcgtattcattcaatcccttgttggatacagtcacccctttttcatcgtcatacagactgacaaaagcttgttggtgttgaggattttcagggttttcccatgaagcagctggtttgtttggtcgtgtcaccacctcatagatactttcagaatcattgcttggacgcgtgttatgagtcttgaccaagagacggatacggtgatccttggcagtgttagtaaagcgagtcttgaagcggatttgtggattgtcaacgaagacagtcaactcagtttccagaggaatgtttgtcaattcttctgaccgtccagcctcacgcttcataaactcgatgataccttgttgctcttcttctagcttttcatccgcactgacaggcacggtcaattcatgtttgagcaagattttagcatagcaagctgtgttttccaagacctcgtggcccttaagctctgcaaagattggctctgttccttttggttggaaatagatatactcgtttccgatgtccccacggtcttcaaagcggataaagtcttcataggcttcgtgagttgtcttgtcatagactgtgatgttgtcatccacactcaccgttacgaatggtgtatcaatcactccgttttggtaaataccctcacggtgttcttgttttccttccagcaattggaaggttgtccaagaaagcggcgctaggtgaactggaatggtcacgcgcacttgacgagcaatacgagcttggcggaacttgtcttttggtaaattatactcaaaattagctccgaggtcttcgattgtagcctctacaggacgaccatccaagtcctccacacggtaacttggcaagataagagcagccatctttttgtagccttctgttgggtgcaattccttgaaatcacaagtcgccacatcaatcactgtgctgacagtatcgaccttatcatgcaagcctgtgttaatgacagtaaagagatagtcactttgagccttatccgtagcaattttacccttccactcgttgagcaagttacttttaacaaagtttcctacttggttgaccttggcaaaacgcgtttccatctcgcggtgaacttcgtccacgctacagccacagatactatcatgtggcgcattctgcaaaagtgttttccaagcataggtcaactggtccttgtggttgtgtccaccagtgataatagtcaagggttctaccacttgctctaggaggttgctattttcttggaaggcttgttttaggtaaatgcgggatgaagaagtgttggcaagtgtgtaccagccatctgtttcctgactggtcaactcgcctgtaacagttgataagtgttcaggaagcgcaccttctacagcttgaacatattcatcaaaagaactatgaacaaagattacatccgggaagagttcatttgccacacgaatggcttcgctcagatttttctgtacaggctggtggtcacagccgttcatcatcaaccattggttggtcgaagcgtaggcacgcacatctgacaatttttgtttccagaaggtcaaggcctcatctttgtcaactggaatttcattcccgttactgtaccagttggcaaagagaatacctaaaacacgactaccatccacaccctgccagtacatttctgaaaactgagacgtaaactgctcatcttcaaggacttggttgtcaaatccaatcggcttcacaccacgaccaaaggccgccacgtgaatgcctgatttttgaagaatttgaggcgcttgtcccatatttccaaaggtatctggaaagtagccaatctgggttgatttaccccatttggcagcttcttgttgaccaatcaaggtattgcggacattggcttcactggagatcaagtagtcatcctgcaagatgtaaaagggaccaattttaagtttgccctcgtcaatgtagcgttggaccttgtcgcgattttcagggcgaatttgtaagtagtcatcaaggacaatagtttgtccatccaagtggaaactcttgaactcagggtcattttcaaagagatcaaagagattgtcaaacaattccaccaactgcatacgatggctttcaaaaggcaagtaccactcacgatcccagtgactatgtgagataatatgtacaacaacattttccatgaagtaaaacctcattctaaatttaaattttaacgttttaaatgtaaacttgtgattctgataagaatcggttgagctaaagcgagccccttagcgaatatccaagtaatccaagaccaactcacagaacatcatgttagcccaggagaaccattcacgagagtagagggtcggatcatctacatgaaagctttcgtgcatgacacctgtaccaccatcgcaggcaaccagctgatccagcaagaattttttctctgccttatctcttgttgtcaagccttggatagaaagggcgattggccagatatagcgatagaaggtatgagaactgccgagaccgcttgcgtattctccttggtagaagtatggattttcagagctcaaaatggtacgacgagtagcttgatacacttcatcatcgaccgaacagtagcccagatagggcgcagctagtagacttggtacatttggatcatccatgatgctggcatttcctaggccatccacttcaaaagcgtaaatcttttcgcccttgctgttggtggtgtaagcgtagtttttgattccttcttggatttcatcctgaagacgcttggcatcagcaataacactctggctatcagctaggtttaatgctgcgaagatttcttgcacataacccaagactactacagcaaacatatttgacggaatcaagtaactatactggcaacagtcatcactcggacgaaaagctgaccaagtcatacctgtcactgcaaagtcaggtccaaagccatcatttaccaaggtgtcttccttacggtccgtatctcggacaaaacgataaggagagttcttgtggtcttgttccaccgtccacagatggagaatttccttagtcgctgcgacaaaaatctcatcaaactgactagtctcgccagtctctttccagaggagataagccaactgcaaaggatagcaaagcgaatccacctcatacttgcgctcccagatccagccgttaaggtctgtgtggtcagtctcgtggtgccctttccagttctcctcaatgttgaaggagttagcatagggatccttgagtaccaaggtcatctgacgtttgaccaaacctgcaatggtctgacgcaggagggcatctcttttagctacatgaaggtagggtctgagttgggctgtcgaatctcgaagccacatggcaggaatatccccagtcaagacaaaagttgaaccatcttctaagatttcaaccgtattgtccaaggtatcggtgtagcaacgctcgaaaacatccacccactctggatagtccttagcccgctctgctacttcatctagccactctctgacaatttctttcgaataaaccattttaaattttacctctttcaaacaagtttcatgttcagtatatagcttttgagacagaaaatacatacacaaatgatagtcatttttctacaaaatagttatttttgaaactccttttctaaaggccctctttttctgatataatgtagaaaaacagctaaaggaaagactatgaaaccactacttgaaaccatcgatacccgctttggaactaccaacaagcatgccttttctcggggaaataccctgccatacacaggcgtgccttttgggatgaattactttgtgccccagaccagtgaccaggatggatcttggttttttgatccacatctgcctatctttcaggggattcgattaactcaccagcccagtccttggattggggactactcttggctccttctgacacctgtcaccagtcaactggggggagacagcctctttcaccgccagtcttcttatgatatagataaagcttgcttccagcctcactatttgaagctcttttctctgcgttatcagattgaaacccagctcacaccgacttgctatggtgcttctattcgtttgaatcaaaagcaaggcaaagccctctccctctatcttcacgcagcagatgaactgacagtagagcaagtagataagcggactcttgccctgcgacaagaaggtaaaactgaaactaacaaaaattcgctaacgatgttcactgccctgcaaatgaacacggatattcttgctatcagccaagaagctggagactggcgaattgacttagcaagtagtcaaaccgagatgcaactagccacttctttcatctctccttctcaagctctaatcaatctacctcaagaagattttgatagctgtaaatcaagtgcccaagtggattgggaaaatctcctccatcgttttgacattatagagacaggagaggctgaccgaaccttctttgaccactgcctctacagactcttcctcttcccacagactttttatgagattaatgaatcagggcaagccatccacatggatctggctactggtactgtcaagcctggtgtcctctttagcaacaatggtttctgggataccttccgcaccaccttccccctctttgcccttatcataccggagcactatcaacgctttttagaaggtttcctcaatagctaccgcgatactggtttccttccaaaatggctggctccagatgaacggggtatgatgccaggtacacttttagacggtattatcgcagatagcgcctgcaaggacatgacccccgacctagaaggagaactcttccaagccatgctcgaaacagccagcaaagccgaccctctcggcatcaatggccgccacggactagcccaataccaagaactaggttacctctctaccgaccaccacgaaagtgttagccatactctagactatgcctatagtgacttttgtatcgccagctgtgccaaaaaactagagaacatagaaatcgctgaaacctacaaggctgcttcacaaaattaccgccagctatttgacgctgagacaggttacatgcgagcacgagacaatcaaggaaactttcaccctgacttctctccttatagttgggggcgagactacgctgaatgctctgccattcaagctactttaggcgttctccacgacatccctggcttaatccaactgatgggtggaaaagaaacctttagcaactatcttttgaaagcctgtcaagatgctcccctctttgaaacaacaggctatggttacgaaattcacgaaatgagcgagatggctactgctccttttggacaaatagccatttccaaccagcctagtttccacattccttatctcttccgttacagcgattaccctgactacactgcccttcttatcaagacgctccgtcagaaagcttttcacccaagttgggaagcctatcctggagatgaagacaatggtagtctctctgcttggtacatctggtcagctctcggattttatccaacctgtccaggaaaaccaagctatgacctcggaatccctctctttgaccatctacgagtctacctcgctaaagaagataaatggctggatatccatactaaacaaaaccacaaccattttaactttgtcaaagaatgccgactggacaaaacactcgtatcaactattcaacaccaagacctcttaaaagctgaacaactaactttcaccctcagctggttaccaagtcactaataaccaaaagaacctttgcatcgcgcaaaggttcttcttttatgaaacttggacttgaagttgatccacaagctgaccatccaccgttaggttcagatagaaatccaaggttttatctcctgcgaaatacaaggttggtagcgtcagacttttttcagtctcaccagtttgaaacgcaaggacttgaatctcatcctgataggcgacaccatggacacctgtccccggttgaatcgaaatcttagcttctaaaggaccactacattctctgcgcttaactgtaaaataggcattttctccctttgccacagctaggcttttttctgcaaatgctagttcctgaacaacttctttttttgataatccaggagttttataaagggaaatcttggtcaacaaaggcaaagcctgtgattctgtaatgactacacgtatcttctgtgcctcaacaactgctcctcgtaagagacgtttgtaaccaacagtatgacccgaaccaaactcctgccagacaccatccacctctacttgcacatgaaaagcagcgattcgttgccctagcttcaaatcttctcttaactcaattacatcaaaagttttaggagaacctaagtcgagttctaactggatgggcaagtctgcatcgcttgcccaagagctggtctcaaggccgtctgtcaaatggcgacaagcaaagtctgcggaaagagctggaccagatacctcagctcccagagccaaatcttctttatagagctcattgcgataggtcgcaaattcataaagtcgttcaatatcctttgcatcaaagagcccagcttgattcggcggaatattaagcaagagtggagttcctcgccctactgagtgaaagtagatttcgaccaactcctcgagagacttaggatcctgatcctcatggtagaaccagcctggacggatggaaacatctgcctctccgattgaaaaaatcgtgcccgagggatccccgtgctgaagatagttcagctctgcttctgttcctagtttatcaggattcaccttttgccacagtggatcacctgcataccctcgttcattgccaatccagcggatactggtgccttctgttgaaaaaatcaagcaatcgccctgcaggtcacgaatggtttcaaaccatttttcaaattcataattaaccttttgcgcgccctctcctctggcaccatccatccaaacctcagcgaacttaccagcattcccatagttaggatttgataagatttccttcaactgagccagataataggcattgtagtccgcttctcggtccacatgatagaggggactatgggcatcccacggtgacaggtagacccccatatccatatcaaactctgtggcagcttgggatacttcaaggagcaagtcgccctttcctctcctccaaggactgaccttaaccgaataatctgtgtgagctgtcggataaaggacaaagccatcgtggtgcttgaccaccaaaatcaactttttgaagcccgtttccttgagcacacgaacccactcacgcgcatccaactgactcgggttaaagcgctcaggatcctcctgtccagtcccccattcttggtcataaaaggtattaggaccgaagtggataaaagctgctagttcatctcccagataagctagctgagtctgacttggtaacggtccatgcggtttgattttcttcatcgttatatatctccttctttagcaacttctcttattcacaaagttatccacaggttgtggataataaaccatgatctaacagtcagctctttccaactccaactggtaggctcaggatttttctcctcaatattccctcttcaaacagctctgtcatatggttctgctaacacctctcagaatgctactctccataattattctcaggcttctttcaggtcattgtgtgaagaccattcactatccagacttttccacagattgtgaataagtgattattctaaactatcacctcgtcgactataacaaaaaataaaaagagggtcaataagataattatctcttcctaaatactcagaaaagattctataatttgtacaattgaacaagaaatgcttctccaaaatctatcttcaaaagaatgttgcatctttttatcctttcacacaaacatttctctttatacagatccaagtgataaccagatgataattggacactttttgatcatttgtatattttttgaaaaattttttaaaaaaattttatatcctttttatagaagtttatgcatttgtatctatgtattctatcctatgttatgtataataacataaaattgtgctaaacatcataatttatattattttccgagaaattatagccattgacattacctaggaattgcgttataacatacatgtaagcggtacccaaaatggtgccaagtcaaaatttttaaggaggaaaatacatgtcttcacatccaattcaggtcttctcagaaattgggaaactgaaaaaagttatgttgcaccgtccaggcaaggagttagaaaacttgttgccggactatcttgaaaggcttctttttgatgatattcctttcttggaagatgctcaaaaagaacatgatgcatttgcccaagctcttcgcgatgaaggaattgaggttctctacctagaacaactcgctgctgaatcattgacctctccagaaatccgcgatcaatttatcgaggaatacttagacgaagccaacatccgtgatcgtcaaaccaaggttgctattcgtgaattgcttcacggcatcaaggacaaccaagaattggttgaaaaaacaatggctgggattcaaaaagttgaattgccagaaattcctgacgaagctaaagatctaactgacttagttgaatcagagtatccatttgcaattgacccgatgccaaacctctatttcactcgcgacccatttgcaacaattggaaacgccgtatcgcttaaccacatgtttgcagacactcgtaaccgtgaaacactctacggtaagtatatcttcaaataccacccaatctatggcggaaaagtggatttggtctacaaccgtgaagaagatacgcgtatcgaaggtggagacgagttagttctttctaaagacgtccttgcagtaggtatctctcaacgtacagacgcagcttctatcgaaaaacttttggtcaacatcttcaagaaaaatgttggcttcaagaaagttttggcctttgaatttgctaacaaccgtaaattcatgcacttggatactgtcttcactatggtagactatgacaagttcactattcacccagaaatcgaaggcgaccttcacgtttactcagttacttacgaaaacgaaaaacttaaaatcgttgaagagaaaggtgacttagctgaacttcttgctcaaaaccttggtgtagaaaaagttcatttgattcgttgcggtggtggcaatatcgtagcagctgcgcgtgaacaatggaacgacggttctaacactttgaccatcgcacctggtgtggtagttgtttatgaccgcaataccgtgaccaataagattttggaagaatacgggcttcgcttgattaagattcgcggaagtgaattggttcggggccgtggtggacctcgttgtatgtctatgccatttgaacgtgaagaagtgtaatcgctgttcgatattcgtcaatagaaaatgtaaaaaatagaaagaggaaataataaaatgacaaattcagtattccaaggacgcagcttcttagcagaaaaagactttacccgtgcagagttagaataccttattggtctttcagctcacttgaaagatttgaaaaaacgcaatattcaacaccactaccttgctggcaagaatatcgctctcctatttgaaaaaacatctactcgtactcgtgcagcctttacaactgcggctatcgaccttggtgctcacccagaatacctcggagcaaatgatattcagttgggtaaaaaagaatctactgaagatactgctaaagtattgggacgtatgtttgacgggattgaattccgcggattcagccaacgtatggttgaagaattggcagaattctcaggcgttccagtatggaacggtctaactgacgaatggcacccaactcaaatgctcgctgactacttgactgttcaagaaaacttcggtcgcttggaaggcttgacattggtatactgtggtgatggacgtaacaacgttgccaacagcttgctcgtaacaggtgctatccttggtgtcaatgttcacatcttctcaccaaaagaactcttcccagaaaaagaaatcgttgaattggcagaaggatttgctaaagaaagtggcgcacatgttctcatcactgaagatgctgatgaagcagttaaagatgcagacgttctttacacagacgtttgggtatcaatgggtgaagaagacaaattcgcagaacgtgtagctcttcttaaaccttaccaagtcaatatggacttagttaaaaaagcaggcaatgaaaacttgatcttcctacactgcttgccagcattccacgatactcacactgtttatggtaaagacgttgctgaaaaatttggtgtagaagaaatggaagtaacagacgaagtcttccgcagcaagtacgctcgccacttcgatcaagcagaaaaccgtatgcacactatcaaagctgttatggctgctacacttggtaacctttatattcctaaagtataattttagataataaaccgtctaccaacagctatgagggctgcgactaatagctttagtccggtcctcttttatgtaatggtaatctattatttcttataaaatatgtgaaaaatcattaaattgaaatctaaacgcattctattgagtgtgataaaggagaatttatggcaaatcgtaaaattgtagtagctttgggaggaaatgcgattctttcttctgacccatcagcaaaggctcaacaagaagctttagttgaaacagctaagcatcttgtaaaattgattaaaaatggagatgatctgattatcactcacggtaatggacctcaagttgggaatctcttgctccaacatttggcatcagactctgaaaagaaccctgccttcccactcgactcacttgtcgctatgacagaaggtagcatcggtttctggttgaaaaatgctttgcaaaatgctctcttggatgaaggcatcgaaaaaaatgttgcctctgttgtaacgcaagttgtcgtagataaaaatgatccagcttttgttaacttgagtaaaccaatcggtcctttctattcagaagaagaagcaaaagcagaagccgaaaaaagcggagcgactttcaaggaagatgctggccgtggctggcgtaaggtcgttgcctcaccaaaacctgttgacatcaaagaaattgaaaccatccgtactcttttaaataatggtcaagtcgtcgtagctgcaggtggtggcggtattcccgtcgtcaaagaaaacaatggacatttgactggtgtcgaagcggttattgataaagacttcgcttcccaacgtttggcagaattggttgatgcagacctcttcatcgttttgacaggtgtagattatgtatttgttaactacaacaagccaaaccaggaaaaattggaacatgtgaatgttgcccagctggaagaatatatcaaacaagatcagtttgcaccaggtagcatgcttccaaaagtagaagcagctatcgcttttgtcaatggtcgtccagaaggaaaagcagttattacttcccttgaaaatctaggcgccttgattgaatctgaaagcggaacaattattgaaaaaggataagttgttttactaataagatgtattctatttctagtatctttatatcaaattagaaattattcttgaaaacatgtacaatatttcaaaagatactagttttagactttaatatggtaaaacaaatataaatagaaagcgttttcttgaatgtttatttaagaaagtagttggttttttacactttgttagacatcaggaggaaaaacaaatgagtgaaaaagctaaaaaagggtttaagatgccttcatcttacaccgtattattgataatcattgctattatggcagtgctaacttggtttatccctgcgggggcctttatagaaggtatttacgagactcagcctcaaaatccacaagggatttgggatgtcctcatggcaccgattcgggctatgctaggtactcatccagaggaaggttcgctcattaaagaaacgagcgcagcgattgatgtagccttcttcatccttatggttggtggtttccttggcattgtcaacaaaactggtgctcttgacgtagggattgcctctatcgtgaagaagtataagggccgcgaaaaaatgttaattttggtactgatgcctttgtttgccctcggtggtacaacttatggtatgggtgaagaaacaatggccttctatccactccttgtgccagttatgatggccgttggttttgatagcctgactggtgttgcaattattttgctcggttctcaaatcggctgtttggcatctactctgaatccatttgcgacaggtattgcttcagcgactgcgggagttggtacaggggacggtatcgtacttcgtctgatcttctgggttaccttgactgctcttagtacttggtttgtttaccgttatgcggataagattcaaaaagatccgactaagtcactggtttatagtactcgcaaagaagatttgaaacactttaacgtagaagaatcttcatctgtagaatctacacttagcagcaaacaaaaatcagttctcttcttatttgtgttgacattcatcttgatggtattgagcttcattccatggacagaccttggcgttaccatttttgatgactttaatacttggttgactggtcttccagttattggtaatattgtcggttcatctacttctgcactaggtacttggtacttcccagaaggcgcaatgctctttgcctttatgggtatcctgattggtgttatttatggtcttaaagaagataagattatctcttccttcatgaatggtgctgctgacttgctcagtgttgccttgatcgtagcgattgctcgtggtattcaagttatcatgaacgacggtatgattaccgatacaatcctcaactggggtaaagaaggcttgagcggtctatcttcacaagtctttatcgttgtaacttatatcttctatctacctatgtcattcttgatcccatcttcatctggtcttgccagcgcaactatgggtatcatggctccacttggagaatttgtaaatgtccgtcctagcttgattatcactgcttaccaatctgcttcaggtgtcttgaacttgattgcaccaacatctggtattgtgatgggagctcttgcacttggacgtatcaacattggtacttggtggaaattcatgggcaaactcgtagtcgctattattgtagtgaccatcgcccttcttctccttggaaccttccttccattcctataaaatagtgagtgaggtgattccatgaaaatagatataacaaatcaagttaaagatgaatttcttatatcattaaaaaccttgatttcctatccttcagtactcaatgaaggagaaaatggaacaccttttggacaagcaatccaagatgtcctagaaaaaactttagagatttgtcgagacataggtttcactacctatcttgaccctaaaggttattacggatatgcagaaatcggtcagggagcagagcttctggccattctctgtcatttggatgttgttccatcaggtgatgaagcagattggcagacaccgccatttgaagcaactatcaaagacggctgggtattcggacgtggtgtccaagatgataaaggcccttcgctcgcagctctctatgcagtaaaaagcttgctggaccaaggtattcagttcaaaaagcgcgtacgctttatctttggtaccgatgaggaaaccctctggcgctgcatggcacgctacaataccatcgaagaacaggccagtatgggctttgcacctgactcatcttttcctctgacctatgctgaaaaagggcttctacaggtcaaacttcatggccctggatcggatcaactagagcttgaagtaggaggcgcctttaacgttgtaccagacaaggccaactaccaaggtctcctctatgaacaggtttgtaacggtctcaaagaagctggttatgattaccaaaccactgaacaaaccgtaacggttctcggagtgccaaagcatgctaaggatgctagtcaaggtatcaatgctgtcatccgactagctaccattcttgctcctctccaagaacaccctgctctcagttttcttgcaacacaagcaggtcaagacggcacaggaagacaaatctttggtgatatagcagatgaaccttctggtcacctatcctttaatgtcgcaggtctcatgatcaatcatgaacgttctgaaatccgtattgacattcggactcctgtcttagctgacaaggaagaactagtagagttgcttacaagatgtgcacaaaactaccaactccgctacgaagagtttgactatctagcgcctctatacgtcgcagaagacagtaaactcgttagcacactgatgcaaatctaccaagaaaagactggcgataacagtcctgctatttcatccggtggtgccacttttgctcgcaccatgccaaattgtgtagccttcggcgccttattcccaggagcgaagcagacagaacatcaggcaaatgaatgtgccgttctagaagatttgtaccgtgctatggatatttatgccgaagccgtctatcgacttgcaacttaatcaggcaactgtttctaccaaaaaaaatcgaccgattaatgaactgcaccccaaaagttagacagaataaatctaacttttggggtgttttattatgaaattgagttatgaagataaagttcagatctatgaactaagaaagcaaggacaaagcttcaaacagctttcaaaaagatttggtgtggatgtttctggtctaaagtcatctgaatctttgagatgagctttataaatcgcttttttcagtttttgcactggtgtttcgataaactcaaactttttagccgtggtattgcctgattttatagtatattgaaactagaatagtacacctctccttctaaaacatttttagaaatcgatttgactgtcctgatcgatttgtcctgttcttatttcattttactatatttgagccacttcgtctttaacggctttattcataagctcttgtaatttttctttactatcaattacttctgattttccgttgtaatttattgtaataggttttaacttacctaatttctcgacacgctcattaatttgatcttttttgaaggctgcttatgtttttcctaagattttttcaaaaatatatttatcagatagcggtttgtcttcttcttcagcttggtttttgtattaatttgaaacataaggaacaaatccttcatagtaacctaatgctcccataagttcaaaagcttgttttctaattcaaaccattgcaactcagatttcagcttttcagataaatcctgctcatccaaataatgacttgaaattagtgctgaactcgtttctgtatcctgtacaggctgagcacccataccagcaaaaaataaactcgttcctagcaagaccgaacaagctcctattgcatatggcctcaaagaaaaacgctgctttctctcaaattgaaattctttcatcccatctcccatcattcattattactgtatattttgtatatcagaaatagtttgtattcacaaatctttctagttattcccttatcattcctaattaagggagataacatacaataatttttagttaaatgtatatcgatgttttttgtttttcttaataaacgcaatacaaaaagagcctgttaccaagctctttgtactcaatgaaaatcaaagagcaaattaggaaactagccacaggttgctcaaaacaccgttttgaggttgcagatagaactgacgaagtcagctcaaaacactgttttgaggttgcagatagaactgacgaagtcagtaacatctatacggcaaggcgacgctgacgtggtttgaagagattttcgaagagtattagtctattatttcttctcagcgcgaagggctgacaagatttgtgttcggatatcatccacaccatttggagtatttggtaaaaagatagtttgatttcctttagaggcaaaggtattcaaggtatccaaatactggttggtcaagaggatagacatgatttgttcttctgtcatgccaacattggcttccttgagttcggtgatagactctgccaatccatccacaatcgccttacgttgttgggcaatccccacaccatgaaggcggtctttttctgcttctgcttcagctgcagtgacaattttaatcttgtcagcttccgccaattcttgtgctgcgacccgcttacgttgcgccgcattgatttcattcatggattgcttaacttctgcatctggttcgaccttggtaatcaaggttttcacgataatgtagccgtaagtggtcatttcttctgctacttggtgttgaacttcaagggcaatctcatcttttttctcaaacaattcatccaaggttaattttggaacagaagagcgaagagcatcttcgatataagatttaatctgagattctggacgtatgagtttatagtaagcatctgtcacgctctgctcgttgacacggtactgagtcgctacattcatcataacgaacacattgtccttggtcttagtctcaaccacaatatcactttgcaacaagcgcaactgaatccgtgctgcaatcgagtcaatcccaaaaggcaagcgaatatgaataccgctattagcaaccttttggtatttcccaaagcgttcaataatcgccaccgactgctgacgaaccacataaactgtactcagtgtgactatcaccaataggagcacacaaacaatcagaaaaatcatgaaaaatattgccataatggaacctccacaagtatttttctagtattatagcacatttaaagaaggctgtgccgtttttactgcgatttttcctgaaatgtcaataattagaggtgaattgtcctattgtcgtccaatctcttgctaaaataactctttataaaaggcaatcgtttcttctaaggttggcataaatggatttcctggtgcgcaggcatcaatcaaggcattcttagaaaggtattcaaagtcgaaatctttttcttcaataccaagttcagtcagtttcttaggaatacctactgtctcagaaagcttctcaatctcagcaatcgcataatcggcacattcttgatctgatttaccttctacatgaagtcccaaggctttggcaacattgcggaaagcttctggtacacgtttagcattttcacgttctataactggtagcaacatggcacagcacacgccatgtggcaaattatatactgcaccgagttggtgagccattgagtgaacatagccaagaccagcattattaaagctcataccaccaaggaagatggcattgaccataccttcacgcgcttcaatatcatgtccattttctacagcacgaggaagatattccttgataagctcaatagcaccaatagacagtttcttggttacatcataagcaccaggtgttaccaaagcttcaacagcatgagtcagagcatccataccagtagcagcagtcaggcctttaggtttggaaagcatgagttcagggtcattaacagagataagagcaaggctattcttgtcaaccattaccatcttaaccttgcgttcttcatcagtaatcacatagttaatggtaatttctgctgatgtacctgccgttgtattgatagccacaactggcaagccttttttagcagacttatgaagcccttcataatcctgtggttttccaccatttgtagccatgatagaaatacaactagctgcatcctgtggagaacccccgccaagactgatgataaagtcacagccatgttcttgcaaagcagctaccccatctgtgacatttttacaagtagggtttggctctacatcgctaaagatgacatattcgattccttctgtatccagtggttttaaagtcttaggtaaaatatcactgccttcgatgtacttatctgtcaccaaaagtgcctttttatagccaagttccttgatataaggacccacttcatttacaacaccttttccaataaggttgactgccggaacataaaatatagccatataattttcctcctgcgcctccgcgctatctatttaacatcattatattactttttgtattcgttttcaattatttgtgaattgtttaacaaatctttttaaaaggataggagggacgtaagttcacctcctatataaacaagttttatttatgtagtggccccaacaactgacatgcacgatagtctgctgattctagatcttctgttccaaataaggaccaatttttaggtctaaagatatcttcctcaggtacattatgcatattgacaggaattctcaacatagaagccaaggtaatcaagtctgctccaatgtgtccatatgttatggctccgtgattagctccccaattattcatgacgtcatagacagacttgaaagcaccttttcctgtcaaacgtggagcaaaccaagtagttggccatcctggatctgtacgattatctaaagtatggtgaacatcttcaggaagttcaagtgtgtaaccttctgcaatttgtagcactggaccaaccccttttagaagattgagacgtaccattgttactggcatatcccccttcgtcaagaaacgagttgagaatcctcctccacggaagtattcgcggtttgctggtgggaagtctgtattttcaagcatagcctgcacttcactttcttccaactcccagaatggtttcataataggtttgccatctcgagtagcttgacctgtaccatccaatgtacaagaaccagagttgattagatgtaagaagccagctgcagcacgaccctctaaagtatgtcccgttacacgtttaacagcctctgggctccaataagtacgcacatcagcaaagatttgtggagtatttgttaatagataattaaagagcatagacacaccatttagtgaatcattctctgtcgcaaatacaaatggttttcgaataccattccagtcaaactgagtattgaggaaagtttccataaagtccccatttggaaaatggtctgtccactgacgttgaccttggaaaccagctactaaagcatggtgaccaaccgcttcttcctcaaaaccaagttcagcaagtcttgggttaccaaccattaagtcacgtccaatcatgaacatcttaataacaaattcccattgtctatctttttcttcacggcttaaaacaaggtcttcacggttatggtcgaatccttcttttacgttttctttcacccatttgagcgcacgttcgaactcttcagggtcgtaaataccacggtccatacggcgcgtgaactccgtcatatctaccgattcatttcgcattcctaagtattcttggaagaaatccggatttacaatagaaccaccaatccccatcgaaacactacccattgataggtaagcagtgtctctcatcaagccagttgcaagagctgcacgcgcatagcgtaaaagtttttctttgacatcttctggaatatctgtgtcactagcttcctgaacatctcttccataaatcccaaaggctggaatccctttttgagcatgtgaagctagtacagctgcaagatagacagctcctgggcgttctgtcccattaaatccccaaatagcatgaggaatatctggagacatatccatagtttcactaccataacaccagcatggtgtaactgtaattgttgcgcaaacatttgattttttaaacaactcatgggaagctgcagcctctggtacacggccaatagtagatggagaaatcacgcattccacaggttccccatctggatatttcaatgtgcttgaaatcaaatctgccacacttttagccatgttcattgtttgcacttcaagtgattcgcgtacaccttgacgacgaccatcaatagtcggacgaatcccaatacgtggatgttgaatcatactattttcctcttatttttctgtttctttcatactaccatctccattatatttacggtagcctgggtgataatttttaaaattacttataagtataaacctctacctctgctaaacttaaaggaattcctgcgcttctcaaagaaattctaaccttttttcccttcagtccttttaagtctatggatagattattgctttctaaactgtcaatatgttgtgtaaaaacttcataatcatttgaatcatatataataatatcaaaatttgataatctctgaatttcagcatctgttctattataaataattaacttttctaattcttcggtttgtgctaaatctatctcccaccatgaaggagaatcttctttggtatgagtcactgaatgatgaccataatctccgtttttatttccatcaactgctagacgagaaaaaccattgtaatccgttgaactctgtcgagtttcttttgttaatgcaatattagaaagtttcttcggagttctctttgaaccatagacttcaacttccgctaaacttaacggaatagctgctgattttaattctattttgactagcttagcccctacagaaggtacttttaaagataacaaaccatcaactactttatcaaaatgtcttctaaaaacttcttctcctgatgaagatagaaaaataacatcaaaattagataaacgctgaggttcggcatctgttctattataaatatcaactttagaaaccgtaaactcttctcccagatcgacctgccaccaagcgttagaatctgccttagtatgagtcaccgaatgatgtccgtaatctccatctttattaccatcaactgctaaagcagctacaccctcataattggttgaactttgagtagctaccttatttgtagagactactttatcttctgttattttatctatatcctcttcagattgcttaccatctgattctctaaaaacctctacttctgctaaactcaaaggcactccactcgttagtaatttaactttaatataccttgctcctttttctttgaaatctagactaacagattcacccgacaaattattaacatgtttcttagcaacttcgtttctattattgtcatatagaatcacatcaaaattagatagacgttgagtctcagcatctgtgcgattataaattttaacaagcccaactttatccatttttttcaaatcgacttcccaccaagagggattatctgccctagtgtgtgttaccgaaccagagttaaaattaccatttctgttaccatccacagctctattagggtctccattgtaatctacagaactttgtgttgttggttttgcatatgctatattcaaattaccatcattaaatttatctggtgttgggaaagagactggacctgtcccctcagtatttatagacatctctaccattccattatgattaaccgtaatggtataaacatgggtattctcatcccaattttctgtataagtataatgatttttatcgccacttatatttatctgaggtttatgaccagtatgcccttttaatgtaagtgttgttgtcctaaagtcattatctacaggattgatggaataatttttgcttatccagttcgctaactctaattcttctttcttccaactttttgatgcatcaaaatttcctgataatgcccacatagctgtcttatctgtcctgtaattattcaataaaatatgtaaattatttggattttctttaacaacagcgtaagtatgtggcgtcaaatctaacgataacgactttgtattattagtatacataggcaacattacttgctgatttttattgatattagcattactattataaatataccaggaattacctacacgctgagcatacccatctccttcataaagttttggataaagcgagtttaaatagttgactttactagacaattcctcactatttttagtcaaaatttttgcattagggaatatagatgaaatcttttccttatcaattttctcatgtattacaggaagaatatgatatctcccattattatataaaggcattgtttcatcattcgaataaagtccttgataaaatccgtttaatgaactaatcctaccttctccattccaaaatacagcttttgttctatttacaacttcttccttacttggagctggattttgtatagcatgtctaaagaaaggaataatacctttagtaaatgctggagttggtacatcatttgtcataaatgtatacgcggcacattcgaaattataaactgtgcctcccccagtatatacattcatcatttccatagcaatcattgattctggttccgatgcataggatctcatatccctagctcttccagtttcaaatgtgtttgtataatgtttttcccaccatttccatgtatctgttgatgagccccagttatcacataagccactcaaccaaaatccactaacgatagaatctgtacccgcatcatctcttattggcgtatttttagttgccaacaccaaatttttatgatatttttgactcgcttcaaagaatgtcggatcattcataatagtttcccagaaccatttttcatgatcatgccagataaaatgcgctccatatttggcacaaacttccaaatatttagcactatgcggagctaactggttattgtaaatccaataattctcaatatttaaaacaccttttaacacactatacttttggaattgttcatctaaccactctggaggaactgtattacgctctccagccgacataataaccaagaaaactggaatgtttagactttgagcttcctccaacatcttgacataccattctctcaattctttcgtatctcgtggaatacaacttgttggtttacagacttttgcaggatgaagttcaatcgctgcatatggctttacatcttcaggaatagcttcccatgctcccttcaatgtgttcccccaccataatccgttaccattatcattgccatacaacggagaaagcaacaatggcgattcattattaatcgtcgttctcatttgaacacgattatcagccttaactcctgctaacaatccaaaacataacatcccaatacatacaaacaatattgtgattaattttctttttattttttctttattcatgacttatacctaaaaatttaactcaataattttttctgaattaaataccaattcaatattttgtacatcagtatttttgccatatattcttactcttactttttgatctttgtttcctccttccaattttaggaatgttatatccccatttttccaagcaaacgataccttatatcctcctcttactctgaaacctttcacttctccttctgaccaagcagaaggtaaagctggaattagtgataaccaattatgatggctctgtactaataattcacaaattccactcaccaaacctaaattaccatcaatttgaaatggtggatggtcaagaaataaattgccaagagtcgcattatttaacaaaccattaatctggttataagcaggttcaccttgatatagtctcgcaaaaaaatgaatcagccatgcagcactccaacctgtttgtgtactagcatgcaaaccacttactaaccaattattaatcgcttgctccctctcctgtgaagataaaaaattagcgtttgataatctcctattgatagtgattttagctgcttctgctaattccggagttttatgaatatcaatctcattataaggataaagcccaaatagaggtgaaatgtgtctatgcccaggctctacttcttcataatcttctaaccattcttggatttgcccattactacctatttttgttttaggtagtttcttttttaactccttcacacgactaataaaatccgaattgtctcctaattgttttgcaatgccaatgcatgaatcacaaaaatatcttagaatttgattatcaattgtagatgatagacaagcatttccttcaataccattttttaagcgatatttattttccggtgagacacttggacctgtcatcaagtagccatccacctcaaataaataatcttcaaagaaaagaaatgcttcttttatcatttcaaaatgttccgtaagaatacgctcatcttggaaatataaatagtgttcccaaatatgagtacataaccatggaatagttaatacccaaattgcagcccccatggcatgagattggggagccgtatcgccaaaaccatccgtattatgatgtgctgtaaaacctctagctccatacattttcttagcggttagtcttcccggttctctcattctttcgagcatatcaaataatggatattctacttctggtaaatcacatggacctaccatccaataattcatttgagtattaatattaatcgtatatttagaaccccaaattggatttaattcatcacaccatattccttgaagattggcaggtaaaccattcggttgactagacgatattaacagatatcttccataatgaaataacaagttagtcaagtagttactatactttttagtgttttcaagaagtagattcgttggaatgctaagacaacctttactatagtctagtttaaaatcaactctattaaattgctcctgatatttttttacatgttcatctttttctgtaaagtaatcaatactactaaattctccctgaagagaagaaatatctatatttccccaataatccgtcattgatttgagataaagaaatacctctgtagcattccgaataactattgtctctcccaatacacttacttcaccatccgtaaccttagaatgacatactactttaaactgaacaccttttctacctccagcagaggccgacattaaaattgtacttgaatccagtttagatacttcgtcattaaaccgtttatttctacccaaattaatgtttaaatttaatgtgttttgaactgatgacactatacggcaacataaaatattcttattaaaactcgtaaaatattctctttttatttgtaaattacaactattaggctcaaacacaacattagaaatagctgtatctaaatctagctctctttcatacaatgaaagagcacaagactgaatatctatatgctcaatgtaaagttccccaagtaattcatagtggctttgatctcttggggtagcaaacactgttaactttatcaattcttcggctttctgaatttctccatctaaaagatattcccgaatttttttaagatgcaatagtgagtctggattatttctatctgactttcctctataccaaatagtctcatcgtttagttgaatacattcttttgtagctgaaccataaatcataccacctaaatgaccgttcccaatcggcaaggcttcattccaatttgcggcagctttcttataccataatttcactctttacctctcttccaaaatggaggtgatatcccaaataccacctccacactttctactacttcaaaattcctaaaacaactagaataactccaatagccataacactaaagattagtacaaccggattctttccttttctaattaatttacacattaataaagtcaaagccatagggataaatcctggaattaattttgtaatcatttcttgaacagaaataacaagttccccctgcttaaattctaatccaaaattaataccaaccattgatggaatcaaaccacccactagtactagccctaatgctgtcgccatactcgtaacgcgattcaatgttccttttgtattattttcttggataagactagaacccttagtatacccatatttcaaaccgaaatatttaacaggaatattaataatattaaacaatattaaggcgataaagatacctaaagcaccgccgtctttagaataagacgcaccaatactaaaacagataggaactagtgtcagccagaacaaactatctcctagaccagccagtggccccatcaagccaactttaataccagtaattgaagctgcaccttcatttccttcttgttcttccatagcggaagtaactccaagaataaatggtgccgctgtttgatgagtattgaaaaactcaaggtgacgtttcattgcaggagaagctgaatctttgtctgggtatagttttttcaatactggaagaattgtatatagaaaacctaggttctgcattctctcatagttccatgaagaaccatacataaaacttcgtttgaaaacttttttaagttcaactttagttactttattattcatcatagatcaagatcctcctcaacatcactacttgaagttgtttcttgtggtttgcttccaatcatatcgtagaagtatgctaccgcaataccaactagtgagatcccaatggttgacattcctccatacacagaacaaatgaatccaatcaacaagaatacccacatatttttcttgagcatcatatttaaaagcataccaaaaccaattgaaggtagtaaagcacctgcagagttaagtccctgcataacgattggtggaaccttagcaaacaagtctgccacatattcccctccaagcataatagctaggaaaattggtacaattttaaataacgtgattaaaaccaaacttgaataatgataaaaaccgatctttgaataatctccgtttttagcatcattatcagcttttttcacaaaataaacatctaaagtttttgcaagaacatccaactgttgggtagcaactgcaattggaactgctatagcgataccagcagtttctccttgaccagataaaataccaaatgcagtaccaataatcgcacctgaaatagtatctggtggagtataacctccaatacctgttacaccgagccaagttaattcaagagctgaaccaataagaacaccttgggtgaaatctcctaatactaagccaaccattgcacttgtaactaacggacggtgaatcataaataacggtccattatagtcaatagtggcaataatcccaactaatgtcaccagtaatgcttgtgtgaatagcatatactgtacctccttaaattatttttataaaaatttttccaacattgtaactttatcattaggaaccatttgaatttcaactctcgttcccttatcaactattttcttaaaataatatttgtcttcttcacctagagctacacctcccgttaccttttcattttcctccgttttactcatctgtcctacattgaggtactccaattttaaatttccttcaatagaatcatacacatcttttggatttgtatatatcagcattgttctcttttttattggcacagagtttaaaacttccacaaaccgttttacactaaagaaaacaatttttaaacctaccggtgcagaaatctttaaaatagattgtcgtgttttatcttctgagatgcgatcattaacaatgataacttgctcaatatcatacttttttagccacgtagtgacaacttgaccatgtaccagacggtcatcaatacgaacaaactctatagacataaatcttcttcctcctctacgttaagttgttgtttaacattaaacaaactattttgagcattgtgaacaatttcttctaaattgatttttgaatcataacttgatattaattccactaggagagggatattaaaccctgttacaatatcaactgaatccaaatttaaaaaccgtgacaaagccacattattaggacttcctccaatcaagtcagtcaaaacgataacctcttgatttgagtctaacagttcatccacttgatttttaaaataatgctcaaactctacaatattctctccaggcatcaaacctaatgtcctaactctatcatttgttgtctcaccaacaaacatttctgcggtcatgagagctccgctagcaaaattaccatgactggcaactaaaattcctctattgaacattttctctttcaacaactactcctttcttaaggataatattagcataaagtgaagtttctcctgtagcaacaatagcataagctttcttactacgttcataaaagtcttctcttctaagataagtaatcgttttaagatctgtaccatgaccttcaatcatctgtctataggtaccccatatcttaggaatatcatcacccgaaacaacgttcataaactgaattgaactatcgacgtaactatctaatggcattaaatacagaatggaatctaataattctggaatatttacaccatcacaacgaattagcttatttgcacatgaggcagaaggataattcgcgtcagctaatactatttcatctccatgtcccatttccattaaagtcttcaataaatctggagaaatatttttcggtatatgttttaacattaatatcctccctattttctctgaccgtatgttttaaatttttctgccatcaattccatctcctcatcaggaagaactactggctctccaaaattcttagctaaacaataaatttttgcacaatattcaacttcttcaacaatattaaatgcattcaataaattttgtgcacctgctaaaattccatgattcgctagtaaaactgctctacgaccttccattgctttagctgcattcacagccaattctttcgtgccatatgttgcatactcagctacccgaacatctttccctgccactgcaatcatataatgactcgctggaagtggttctctgagacaagctaatactgttgcataagttgtatgagcatggataattgcatcgatatcatcacgagtttgatattgaatcaaatgcatataccattcgctagatggcaagcgttctccctctacaacatttccattaatatccatcactacaatatcggattctttgatttcaaagaaatcaatacccgacggggtaattgccatcaattgtttttcacgatcgaaaacgctgagattcccacctgttcctttcgtcaaatctgtttctactagcttcttaccatatttaattaattcttgttttacatctgacatccttgtcctcctcatatcaaaacactaaatatttttcaattcaccaattatccccccttcctgcacaaaagctaagaagggggagggaggcaaatttacaaactctcaatctttttaattcttttgggagtaataactctctaattgtagaaactcctcaataacatggtgagcctcttccatcccttttaattgtcccatagctatgagctgcacaacaatattccccacagctgtagcctcagtcaaacctgtaagaacctctttaccagttctatcagcaatcatttggttaaagtaactggctctagcacctcctccaatcacatatatcctcttataaaccttatgagttagttcttctagtaactctatcgctttcctatacgtttcagctaggctttcataaacaatcttaaatagttgtccatctgtccactctctagtttcatgatgataagctagatattctgtcaaagtcttgtgcatatcagattctgttgcaaattcagttgattcagtatcaatcagaggaagattttctttttctttctccaccattgtcctaatatcatcaaaagaataggctttccctcttcgttcaaatgaacgtcttagttcctctatgatccacaaccctgtacaattcttcagaaatgtaatcactccatctttaccgacttcatttgtaaatccataactgaaggattcggtagtaagaatcggtgaagtaagttccactccaaccaaagaccaagtacctgatgaaataaataaactaccttctgtcttaggtactgagacaatcgcgcttgctgtatcatgactacaaacattcacaacaggaatatcgcctaaaccatactcctcttttatccttccaagaacatttccctctgaaacaatttcaggaagtaaagatgaatccaattcaaatagttttaagatattctgattccaattttgactcctaggatcaaataattgagttgttgaagcaatgcttttttctgtagcaaacttacctgtcaagagataattaaacaaatctggcattaaaagaatcttattggtcttatagaaagagtcaggagattcttgacgtgccttaaagagttgaaacaaggtatttatctccataatctgatttcctgtctctgaatacagtttttctaattcagtcatttcagatatttcctttaacactccctttgttctttcatcacgataatgaacaggttgtaataacagcttaccttcattatcaatcagtccaaaatcaactccccatgtgtcaataccgatagataaaatcttgtaactagtattagccaagcggatactttcaagaattttagctagtagaaagtcaatatcccaagataaatgcccttttactctaataggtagattagaaaagcgatttatttcttccattactagtttattttcagaaaggtaaccaacgattgctcttccagaagtcgcacctaaatctattgctaaaaccgcttccatttttcttctctcttcgtccttgattaactttattataatccccacgttttattttttcaatatgtgaacgcttacttgaataatgttcaaatgttaacccaatattcataaaaataattcaaattcctccaatttgtgctataatatagttgaaatgataaattaggaggagcttatgataaaagatgaacgtgtacttgaattgattgaaattatcaaaaagaaaaaaagaattgccgtaaaagagctggcagaaatcactttctccagcacaagtaccttacgtcgtgatttaattttcttagaaaatcaaggtcttatcaaaagaaagcacggatacgtgaccctgtcctctatgaacacaattgaactttctcatcaaatacgtgaaggagaaagtactaggcaaaaaagactaatcgctagtctcgctaaagactttattcggtctggtatgtgtatctatctagattctagtactactgtctacgaactctgtccctatctttctgaacttgataatttgattatttttacaaatggtttacatactgcacaaaccctatctgaaactgttaaagatagctccaaaatctttatcacatctggcgaggtcaaacatcaatcctgttccgtggtcaactatgataaggaaaattctttattagatcattttaatatcgatttagcattttgttcagcaagaggtattgatgaccaatatgtttatgaagcttctctcagccaagctatttcaaaaaagaatattattgacaaagcccatgaaaccatcttactgattgatagttctaaattttacaagactggattttttaaaattaatcccctctccaaatacacaacctttatttcagacaccgtgccagatcaaaaattattagacgcagtcgaattatttgatggagaatgggtttctgatattcaatgaaaatcaaataggaagctagtctcagcttgctcaaagtacagatttgaaaattgatcaagtcagctcgaaacactgttttgaggttgtagatagaactgatgaagtcagtcacatatatacggaaagacgaagctgacatgatgtgaagagattttcgaagagtatcgttctgtctgctgactgatttacaaatattcaccacatgacattattttcttagcaaccctaaaaacagaggctggacaaaaactcaatttcaggagaaaatggagtaaaccttcccacaataaaacgcatagtatcaagtttttgcacacctgatattatgcgtttttctgattttaaagatttttctcttagatctgatatttcaagaattaagtgaccttgatgatctaaatgtattgtggtatactatttttgtcatcggttaccgattacgttcctatgggttcgtgagaggaggtgaaactaatgagccttatcatagagctcgctcttactattatagcggatgttatagctggaattatcttgtatttcgtctgcagatggctagatagtaaggagtagaccgactgactagcctataaacacccgttaaatcgctaagatacgtcaaaaaagcccttaactacggccatagttaggggctttggtgttctaatgaaccttatcaattaactacattctagcatataatctacaatagttcaagcattaagtaaggttgatgacctgaatgtagtgtgatatactatttttgtcatcggttaccgattacgttccttacggttcgtgagaggaggtgaaactaatgagccttataccagagcttgctcttactattatagcagatgttatagctggaattatcttgtatttcgtctgcaaatggctagatggtaagaagtagaccgaatgactagcctataaacacccgttaaatcgctaagatacgtcaaaaaagcccttaactatggcactagttaggggctttggtgttctaatgaaccttatacactaactacattctagcatataagcccagatatttcaagagttttatttattgtttaaagttctgaaaggtctataatgaagttagccatctagtatcaaaaaaccgactagctcttatgaactagtcgatttctcatcaatgcgccaacatttcttgggcgatttcttggccagataggttatctgggtagtaggttggccagttgtccatttcttcaaagagggcttcttggcttgtgcctccaaagaagatatggaaatgttctgccttaactggggcaacattgtggtcactaaactgaacatacttgaattgtccagcgtcagcatctgtggcttcaaagaggaaacgcacgccacgattgcctttcttgtaagtcaaaattttcttaccgacatacttgtaagtgtatttcttgctttgtccaccttgaacaaattccatagtattatcagtaatgttaatcttagtcacatctgtatgatagccttttgtatagtaagccttgtactcagcctgggtcatcttaccagtcaacttagccttgtagtcaaagacttggtcaaacgtgccgtcttcaaggaaaggataaactgattgccagttacctgcatagtcactcaaggtgcggtccttgacagctgcatcctcgaagtaaccattttggactgtcttggtatcctctgccttttcaggttcaattgctgggccttcttggtctgttgtttgtttcaaagccttgaggtttttctccatcacggaaatgtagttttctccagccttggtgtcctcttctgtcagactttctaaaggattgaggacatcagttttgacacctgcttcttttgaaagtgtgttagcaagggcttgtgaggcattttcttcaaaatagatataggcgattttatttttcttgacatactctgtcaattctgccaagcgagcagctgatggctctgcatctggagaaagtcctgagattgcgacttgtttgagtccatagtccaaggcaagatagttaaaggctgcgtgttgagtcacaaagctcttttgttttgcttgagacaaaccttctgcgtaagccttatccaaggcttgcaatttttcgatataggcagctgcattcttctcaaaggtctcttttttatcaggataatctgctgacaagctgtcgcggatgtgctctactagtttaatggcacgaactggtgataaccaaacatgggggtcaaactcatggtgatgaccttcttctccatggtcatggtctccctcttcttcctcgccacctggcaagagcaacatatcgcctgtcgccttgatggttttcacttttttcttatccaaggtatctagcaatttaggtacccatgtttccatgttttcattttcataaacgaaggtatctgcatcttggattttggcaactgccttggcagatggttcgtattcatgaggttctgtcccagcaccgattaggagttctacattagccgtatctcctgcgacttgcttggtaaattcatagacagggtaaaaggttgtcacgatattgagtttaccatctgcctgtttttgattggaacaagccactaaaaacaaggcacatagactggctagtaataagctaatttttttcacgttcgtctcctatttgataaaacgtcttactaaactgattagtataaagacagttacaaaaataatggtaatacttgcacttgcaggtgtttctgcatagtaggaaatgtaaagtcctgctaccattcccaaaaagccaatcgcactggcaagcagcataaccgatttaaagtttttccccagacgcagggcaatactagctggcaagaccataatggtcgataccagaagagctcctgctgcaggaatcataagggcaatagccacccctgtcaccatgttaaaaagaatggacatggtacgaactggcaagccatccacaaaggccgtatcttcgtcaaaagttaagatatacataggacgaagaaagagaaaggtcaaaatcaaaacaaccgccgcaatgacaaagagggaaatgacctgttcttcactgatagtcacgatcgaaccaaagagatattggtccaaactcattgaactcgagcttttacccttgctcatgacaatcagagaaacagccagacctgttgacatgaggatagctgtcccgatttccataaagctcttgtaaaccgtacggagatactccagaaagaccgccgcaatcaagacaatggcaatagtagaaacagttggagaaatccccaaaaccagaccaaaggctacacctgaaagtgagacgtggctaagggtatcactcatcaaactctgacgacgcaagatgaggaaggttcccaataccggtgagaaaagactcatagcaataaccgccaaaaaggcgcgttgtataaagtcgtaagataataaactaagcatggcccacctcctggccattctcatgaacattgaaacaacgccatggcgagtcttggttacggactagatgaatattgcgatccgcataatccttaacttcttcagggtcatgggtaatcatcaaaacagccttgccatgatgatgggcgctgtggtgcatgagttcgtaaaattcatttttacttcctgcatccatccccgttgtcggctcgtctaggataaacacatcagggtcagaagcaaacatacgcgcaattaccgctcgctgcttttgtcccccagatagagaccccaagcgtttgtctcgatgttcccacatgccaactgagtccagactagccttgatatgctcctcatcatgagcattcaaacgacggaaccagccttttctcggatagcgacccgacttgacaaattcatagaccgtacttggaaaaccagcattaaaactggcaatttgttgaggaagataggctattctcaatttcttaccttgcgtatttgtctttgaaatagccacctttccaatgcgtggttgcagaattccaagactagccttgatgagcgtcgtcttagccgctccattttccccagtcaaggtaacaaattccccactatcaacacaataattgatatgttcaagaacaggctccttatcataatagaaggacaaatcctctaccgtaatatatctcattatttgatttctcctactaaagcagtcaaaaaccgctgaatcactttttgttcatttggagtaaactgagtcgccacttgttcataggttaaaagtgtatgctcatggtgatggtggtgctcctcagcgattggacgagccaagtcagtcaactgataaaaaatcacacgcgcatctttagaatctttagatgtttccaacatcccttccttgaccaaagacttaatggccttggtaactgccgcctgactgacattgagacgacgggccaattctgaatttgttaaagattcctctgacaagagcataaggatatgctcctgagtattggtcagggccacctcgctagtgcaatgacctattaggatttcatgctgattttccgcctgcaaaatcacctcattcaaaaaagcattgatatcctttgctagctgtctcatatctgactcctttccttttagacttctcttttttaagagaaaaatactattctttgacattttgtttaccagttaattatatcacaagcaaaaaaagagtcaagaaaaaacgtgaaaactagtttcattcttgaactcttctatattatattatctattgaaattctttgacatctccatcataagtcgcccaatctttgctgaaaaagcgctcattcagatggtaagtcggagctggtgtgggattggataggaaaggatcaactgccttgtcaaaagccaaccaacccaaccaaccaaggtgaatggtgtccttcataaagaaaggctccccgccgtccttagaaaaatctgctatattggtaaaaccttgactttctaactggtagcgaatcttctgcaccgtttgttggtacatatcctctcgtagaccagcatagttcatccattttttattaacaggtggaatgataaaaatcgggtttaccttagatttagaaaactgtgttaaaaccaactgcaagtcattatactctggcgacttgagataggtaaagcttttctgagaatcctttaatttcttcaaatccttcttgatctgctcattatagaaataattttccattcccatctcattattggaagtatttttttcagcatctgctttgacaacatcttctattgcctgataagaaaactggtctggcaagatttttaaatacttagctacatgcttatcgtagttaacatagcctctaaccgaaaactgaccaaaaaaggaagcttggcgttcattaaaacgagccaataattcaatcatttcattgtctgctgtcgacaattcttctttacttgccaacttctgaaccaggtccttcatagctacgtttgggaactgttgcagtaagcgagtcgctgcatattgactagcctgatccccagattgatgtttcagaaaactagtcaactggtctccattaaaatactgctggaaggctgctggatcatagccatttttactgaaccactgaggtgagataacatacacaacttgtttattctccagctgtggtaacatctgttgcattccaaaatattggttaagcgatgcagctcccccctgtcctaaaagataaggacggtaggaacgattgtatttctcagctaataccgcaggatgagcaccgtcaaaacgaagccattcactagagccaaagaagggaacaaaacgcacatttggatcagatagtgctctgactttttgacttcgctccttaaaactatcgatagtagtagccactgctgaacgcttttcagctcctagattatgatgcatctcagtaggataaaagaaaatgagcagaaaaaccaacaaaccagcgatcaagaccggtccgaagatcatccataagcgtttaagcattttgtagctccacaataccagctatgattttattagctgtattccagtcgtcacgaccaaactctgttacagggacacgaatgtcaaaacggttctcaatctccacaatcaactcaaccgttcccatactatccaagacacctgcatcaaaaagatcttcatccatcatgtcagaaacatcttccataaacaactcatcaataatttcaataacttctgatttgatatccatattttatttccttttattttttaaaccatagattattcaagaatccagaaaagattaagaatgacaacatgacaacatggaaagtgacaaccatgccaagcaactgaatccagcgattctcaggtagggcagccttccctgcttttttccgttccttattgagcgtttttttcttgcgaacccaggcatcattgatgaccaagcctagtccatgaaagagtccataggcgatatagtaccaggtcacaccatgccaaaatcccataatcagcatatttacaatgtaggccatgcttgaggttacattacgatttttaaagactttctttctggttaacaccatcaccattcgcataaagacaaagtcacggaaccagaaggacagactcatatgccagcgattccaaaactcctttaaatcccttgataaaaagggcttgttaaagttgatagggctacggattcccatcaagtttgagatggccaaagcaaacatagaataacctgcaaagtcaaagaagagttccagaccaaaagtatacataactgccaaggcatagagattaaagaagccacctgactgcaaggctaaattcttcagaggaggtagtaaggtctctcctaaaacatgagctaggataaacttatacaaaaagccccacatgatatagcggacagattcatccagcatatccatcaactcatctcgctcaggaatagcctgataattttcattaaatcgcttaaagcgatcgattggaccactcgagaaagttggcatgaagagaaggaaacggaggaattcccagagggtaaaatccttaatcactccatctctcagctcgatgacaattccaaccgaacgaaaggtcaggtaagaaattcccaagaacccaagcaaagactgcgttccattgatagctggttgcaccttgacaaagataatcggaagtagggacagaaaactaactaagtagaagacccacttgccatccttgctttttcgataatgcttgtagaaaagcaggagcaatatttcccagcaaaggtaaatacccaaggcagctagttgattggtctttccacccaccaacatggtgacaataaagaagagacttaccaacacttcataccaggcaaagcgtttcttgaaaaagagacctataaagatgggcaaggttgcagcaatcacataaacaaaatactgaggattgccatatggctctaaatgaggaagctgttgaaaaaactccatcatctcttattcacctcgttaatcaatcctttgatgtcaatctttccatttggagttagtggcaaactgtctcggtaaaggaatttagatggcatcatataggacatcatgatgtctgtcaggtcttccttgatggccttggtaatatcgatatctcgctcaaactgctcacgaacaccgtcttttaagatgacataagccaatagattttgtaccttgtggtccttgttatagcgcggtactgcgacagcagattcgataaagcgagacttgttgaggttttgagagacatcttctaactcaatgcggtaaccgttaaacttaatctggaagtccatgcgtccgccgtagagaagcaagccctcatctgtcatggttcccacatcgcctgtgtgataggctggcagatcttcaaactcaaagaaggcttctgctgttttttcaggattgttcatataaccttttgaaacagctggcccagaaacaatgatttctccctgctcaccatttggcagtttatttccttcctcgtcaatgataaaggttggagaatcagccttggtatagccgattggtaggcgtttgagagtcgctaacatctcgtctgtcacggcaactgctgacagagctactgtcgcttctgttgggccgtaagcattgatgatacgggcatttgggaaacgctcgcgcagtttttgagctgttttgaccgtcaattcttcaccatcaaagtagaaatgcgtgattccaggcattttctcactgttgaagtattcagacaacatggccatatctgcaaaggatggtgttgatgtccagatagcgattggcaatgaaaagatagccgcaaagagttgcttaaagtcctgagtgatgactgaaggaagagtgaaaagcgtaccaccaagtgccaaggtcggtgcccaatacatgacagacaagtcaaaagaataaggtggctgtgccagcatttgcggacgactcggtgtcgcaaattccttatccgtaatcatccagtttgtaaagctgaggagattatcatgtgaaatctgcactcccttaggcttaccagtcgtaccagaagtaaagataatgtagtaattatcatctcccttgactggatgcgtgatttcatagttattcccttgggcaaaggcttcttgaacctgagctagatttatcattggtgtagaaacctgctccaagggaaaggctgaaatggcaataatcaagcttggctctgctacttctaaaatagctgaaactcgctccaaggccgaatggctatcaattggaatgtaggcatgacctgacttagtcagcgctacaaaggttgccaacatttcatattcttggccaccaaaaacaaccacaggagacttctcaggcaagcctagttggtcaatgactgcagccaaactatccgaatcagcctttaaatcgccataagtgtgttcctgccccaaaacattatagacaggatagctaggctgtgtctgagcaaaatgctcaatggtttcaatcatatctgctattggtttatttgacacaatagggattctccttcaagttaaaattcattatagataaagcttccttgaccctgaccaagatagctaaagaagtaaagcagccctagaaagataagaaaatacaaggctgtccgaccaagaaagaggtacaattcttttctctgtttcatcaagaaaaaccattcatttctgtaatttttcgctaaaataagagtgattcttactagcttatttttctaccattgtaccactttatatagtatcttttcaattgtttaccgtatgtttccaatagatttcagcttattttaaggattatacagtttttctatgtatattttcaaatagagtgatcctgcttcaaaactccatttcaggagacaatgaagtaaatcttcccataataaaacacacaatatcaagttttttcaacacctgatactatgcgcttttctgatttttaaagactttttaaccactctctcatttaaaataatctcgtctgatataaattaaaatagcttctatcatcagacaaatggctgatagccaaaaactgatgctaataccaaaactctcagtaatatagctcattagcaaaacaaatactgaaaatgctaatgtagaaatcacttcaagaacggaatagacattaactaaatgattttcctctactgtttcctgaagaaatacactttcaggaacttcttttagttgcgataacataccaactaaagctgaaaataataaaaacatctgtgcgtttggaaaatatagaatagtcagtgtcactatttccatagctacaagaggaaaaagaatactttccccccaaatcattcatacctctctcaactagatgtaacttacaaaacccctgacctcatgagccactttcttcctcctcatgaggtcagttttactttctgctgttccagtatcgtttttcctcgctagatttcctcaaaagggcagactcctcccttggtgcgtcacacgattttttcatctcgactgttctttaatgcatcattaacgacgcttttcttctaggtggttcataaggaacaggaagattcaggttgacttttctaatcctagaataaagtgctgaaaacaattcggaataggcatagagactagacaatttgaggagctgcttgcgtcctgttcgaacacattttcccaccacgtgaagaaaaagatggcggaagcgtttgattgttaaagtttggaagtcacctccagctagatgtttgagaaaaagatagagattgtaggcgatacagctcatcatcatacgaacttcgtttttgattaaggttgaactatccgttttatcgccaaaaaatccctccttcatctccttgatgaaattctcggcttgaccacgtccacgataaagctgaaactggtcttggcttgttccactcgtcatatttgtaacgagagaaataacatcgtagaacaagtttccttcttttcgttcagagaactggcagacacgacgcttgtgcgaccaagatcctgcttgatagagagtttctgagtaggcggagtggggcaagatggttaagtcctcatcctgtgggcaagggagggaaaggtctccaagacggctcagaacagtatttttcttgagttttatgaggtagtattgccctgttttttcaattaaatcgtataattttggggtcgcaaagccactatccattcgaaagagaagttgattaaaccgttctaaaacaggtgtgataaagctgtctgcctcttcagaacaataacgattaccaggacgaagctgggcattgaaacaataacctgtcttcccctcgaaagcataaagaggatgatagccatgagcacgatagtgggcgttataagcaacaccttcttgcttgccataagttgtgaaatgggtagaatcgatatctacaatgagttggtttagctggtgaaactgtaaaaagaattcgaccaattcaaggttgaggcatcgcaaactatggactgtttcctcgtcagttctggaaagaaaacgggataaggttggctgtgaagcaagctgccctccttccaacaattttggaaagtaggcatcagctgacaattctttacaagcatagtccgttccataacctgttaacagttgaaagaggaactggacaaggatatctgaatccgaataacgacagtagcggcgttggtcattcgttactaaatacttagaaatccgctcttttagtttcaactgggaaaaaagttcctgaaaaaagataagaccaccatactgggttaaatgacctccatcgaaagatagttggtaaaaagacttgttttggaagtgatgatttggtaaactgttcatgtgagtttcctttctttttgtgtttttttctacacttataccataaaggggaaactcttttttgtctagtaaaaaacacccattgggtgaaaaaagaaaccatccaggatctaagctaaggcaaggattctggatggtttttagatttggggtgaataattggggttcccatttagcagcaaggaacttttcagatagcctaaaagcaattaagccactaattataataccaatagagtatgctgtattagaatatccccagtaactttccgttttatttaataactccgttacaaaaacaagtataatggaagaaacccaaatcgtatttgaaaaaatttccaataaatttgctgatacaaaaagtcttaatctaggatttctagcaactaacttccaacctttgagcaaaatttcaagattagtttctgactctaacacctccacttcagcgttaggaagaaataacatcagaaagctagaaatgatatacaagactaaattgatacacgtggtaggtaacagaccaattgttgcaaacaagagtccacctaatccccaacctatcaattgaacagcttcaccagtcattgataaggctgaattagccttacccaaatcggtcgcatagcgtggcacaatagcataggaaacgggtgctgcaaaaccatctagtatggaaattgcaacaacaaatagataggtcaccaaaggcgctacggattgcattacggtaaacattcctaccagtatcgccaataatatagtctttccaaattgagataaagataaaaccctatttagcgctaaccttttagtaaccaacggaactaaaagactcgcaacaaaagaggatattcctattaagataggaactagtgatgtggcaattactgattttgaaataatgtatatgttagcaatgattgttactctaaagaaaatatctgctaaatttgcaaataattgagagactaacaacttgacaaatgaattagacatgtagcgctccccctttagttacaaactttggaattaaatttgatttttaatattttagcataaaatagcagaaaacaaaagtgaggttttttacatgaaaaaacaaaaactattgcctttattattcctaattttaggaggaattatgattatcgttgttggctagtactaagaagttagttagttagtagaataattacatcttcaatcgaaaaagagactggaaaaagtcttaaaaatcagaaaaacgctcaaatcctttggcgctctaagcttttctaatgatagatttagatagtcaaaaaaatatctgaaaagttcccaggatcgtcgtctcagcatcaaaaatacgtgaaatttgcataattaaaataaatttcaggggagttaatcgagtaggggataatctctagcccctctcacaccaccgtacgtgccgtttggcatacggcggttcaactaacttttaacgcatgtcgttcaaggtaataatccaaacacgaaaccagtccacgtttttccaggactggttttgatatagcacgtttaagtaccgacttctgagctactaattgataatggtcgccccagccagataccttatctgctatccatttaggaactcctaacttaagcaatccccataatcgtctcgatttcttcttccattgcttccagataatcactcgtaggcgagtacgcaagcgctcatctatgctggcgactatacttttcatatttcccaatgagcaatagtttatccatcctcgaatagacaaattcagttgctcaatacgtcttgttaggtctatactccatttcctctgtgttagtttcttcaatttaaacttaaatctccgaacactatcttgatgtggacggcttttccaaccatctgataatttccagaacccaaaacctagatatttcaactctcttggtcatgtttactttcaaacctagccgtttctcaataaaacgactgactgaatacatcacacgcttagaggctgcctcgcttccgaccgtaatcacacaatcatctgcgtagcgcacaaatcgaagtcccctcttttctaattccttgtccaattcattaagcatgatattggataagagaggagataaatttcctccctgtggtgtaccaactagtgttttataacgttgaccattaatgataacacctgaatgaagatacttacgaatcaaggattccgtatctccgtcttcgataatgttatgtactaaggacatcaatctatcttgaggaactgtatcgaaaaatttctctaggtctaatccactatccactcatagccgtcatttaagtattctaagagcttcatgatggctttttcacatgacctatttggtctgaaaccataactcgtatctgagaaatggggttcacaaatggggctcatgacttggacaatggcctgttgaatcattctatccataactgttggaattcctagttgacggatgcctccgtctggtttaggtatctcaactctaagaactggttgaggcttatattttctctgttttatcagttccttagtcaagcgccagttttgtctgagataattatccatctcttcgatagtcattccatcaatcccagctgagcctttattggattttacttgattgtaggcttccagcatattttcgcgtgataatatcttatctagcagttttgacatgtgcgtattcctttcttattttggtgcctgagggacatcttatattggtgaaccttcatctagtcattacgtgtcaaagtccagttctatcagaccactcattttacagacacaagtgaagtaggattacttcgatctgtcgttttctctttctagcgacagacctcaaacagtctctccccagactgtttgagtattcaccccttcgctccacttccattacggaagtttcctcactactatgggctcggctgacttctcatgattcgttgttactacgctttcagcgctcatgaaacctcacgggataagtcgtacatctttcctcgtttatacaagatatgaggacgttaaaaggttacagtgaaaataggaaatctgacgcagagtctttagactctagaaagatttatctttttcacacaaaccttagtccgaattcaattactctcgtgatttacacatataggttacgactacctttttggactttagagtttgaagcctccttatccgctatatacgccttactatcacgttcctgttcgtagagccacgatttcgctatcccttcctctccctgctacctcacgatagtcaggctgaggacttacacctcagatatacgacatgcccgtcgtactacaaaaaaacgacgatttaaatcgtcgttttgctaatataaatatgcattttttttttttttgaaaatacgtctatttattttttattgttttttattgtagagcagacccaagcgaatgaacataggttgtaaaaagcaaatgaaaaaactgcgaggataatagcttctgtgtctaaataacccatttcgagacctcttttcaacaacaacaagcctgtagtttcgataacgatcaaacataaaaatatataaaaaattttcgcattaagcatattgttaccgctttctttttatttggttttattgtataataaaagttgaaaaaaatcaaaaatacaaaggagtttccgttatgtctaagatgtttaaatgcatgtgtttgctagttatgtctgttttctgtatgtctagcatttccccgtcgcttgtttgtttttgctgatgatagcttatcggcaaactctaaagttgtatctggtgaggctcagtttgagaatggctcatcagtgcggttcggagatacgcaagtaaatattttaagcgatgaagttcttgaggttgtcaatccagatggaagtgtagacactattgaacgacgtgctgacggcgtctatatcaatggggcattttatatggcttatcaaaagaatgaaatcgacctaaatatatcttttagatcatacgatcctaatgtttggaattacgtcaacacaatacatgggaataaacaagctaacacattcgctaacttcatgactggtgctggaatcagttatatgattggtaggataggtgctttattggggggtccatggggtgcaataattggtggagcatattttggtatacaagcttatcagtcttacttggattcacaaagcccatatccatactacataacaagtacttatatccatgttgctcaaagaaaatggaagtttatcactgaatactatagaaactcaaactatactgggtatgtaaaaaccgtaacaacctacgtgaatttctaaaatataaaccctgcctagatataaaggcagggtttatattttagttaattgctcaagtaatttgtaagcataatacttgcgaaactctatttgttcaagcggttcaaaagctcttgttttttaccctcaagctcagctctcctttgctcgatttcttcacgtttttgggcgatttctgcttgcgcctcgggagtttccaaagtgccttgtgacttgtgaaattctactagcatatcaacgatttttgggtctaattcgttgacataatcaggatttgaccatttcggcacgttgcttgcaggtgcttgctttttgccgccttttttgggcgttttggcttgttgttcagctttctgactgtagttgacctcgtggaattttcgtgcttgatatgatgcgttttattatgagaagatttacttcattttttgctgaaattgggctcttgcccaagctctatcaacataattgttttctaatactcaatgaaaatcaaagagcaaactaggaagctagccgcaagctgtacttgagtacggtaaggcgacgctgacgtggtttgaatttgattttcgaagagtataaactagaaaagtgagaatacaagcactgccaaggctgctccgataacagggcctacaacaggaatccaagcgtaagaccagtctccgtctcccttgtttggaattggcaagatgctgtgcatgatacgaggtccaaggtcacgagctgggttcaaggcataacctgttgtcccacctagtgatagaccgataccgacaatcaaagttcccactgcaaaggttccgatacctgcctgaaagtcgtaaagacccaaagcaaagattgtcaacaccaaaacaaaagttccaaggatttcgctaatcaagtttgatacagtatccttgatggctggtccagtactgaaggttgccaggatattgcctgcattttcttctgcctcatagtgaggtttgaattgcaaccaaaccaaaatctgacccagcatggcccctgcgaactgggctaagatataaggcaaaacggaagcccaaggcaaaccaccttttaaggccacaccgatggtcacagctgggtttaaataagctggactgagcttgccagatacaaagactgcaaccgcaactgcaatcccccaacccatagtaatcacaatccaacctgagctattgctcttggttttaggaagaaccacacctgcaacaacaccatttcctagaagaatcaggattaaagtccctagaaattctccaaataattcattcatcatctttctgtctccattaaaaagaagggacgggcgacaaggaatgctgccctccacctcttttattttttcttaattttttaattctgctaaatcgttgttagcgagagctgcttcgacatcagcacggtaagttgctttttcttcttctgtccagtcatagaatcgtcccatttcatccaaaattggctcaacgatactatccaagctatcacgcataaagagcatgtgattggtacgacgaagaaggaagtcaactgggctaagagtcaactcattgcgcattgcatagtgaagggacaaagtatctgccaagctgagtcctggcgcttgttccaagctgtgagcaagtgcaaagactttcggtgcatttgaaccgtaaagatttgccagatagtgagcttccttgctatccaaaccacgtgatactccaagttgcgcaaaggcttcgatttctgaatccacatttgctgggttcaattctccacctgaaacagggtaagttttagaattgatcaatttaaagctacggtcaaattctgctttgaggatgtcaaccacgcgctccatagctccttcagccatcttacggtagtctgtgattttaccaccagcaagagtcaagagaccattgtcatcacggtccaagctagacccacgagaaactgcagatggatccaaatgtttctcagatgtgctactttcaagcttgctgacagcagactcaacatcttcacgtgttttttctttggagagataagattcaacagtcgcaatcaagttgtcaaagctttcatcactgatggtaccgttatttccaccattatagtcagaggcactgttccctgcaatcaatggacgaagacctgcccagctgctttcgatatcatcaatggtgatgttggattctgggaagcggttgttgacaatgccaagtagataatctacatcttcttgagttacttttggatgctccaaatcacctgtgtagtctgtatcagttgtaccaaagtaagtcttgttttcacgtgggagaacaaagaccatacgaccgtcacccaaacctgtgtcgaagtaaactggctgtgaaaccttgattttgcttgaatctactaccaagtgaactcccttagttgggcgcatttgtgagaattgcgttcccttattagacaaattacgtactttatcactccaaggacctgttgtattaataaccagacgggccttgatttcaaacacttggtctgtcaagagatcacgagctacaacacctgtaatcttgccactttcgtcaaagaggaagccttctgccttcacgtggttggcaatgagggcaccgtcttggttggcacgtttgatgttttcaatcacgagacgcgcatcgttgttacggaagtcaagatacactccacctcctaccaagccttccttcttcaagtttggctggcgttccaagacttgatccttgctcaaaaccttgttcgcagctggtgtgttgctaacacctgccaagaggtcgtacaagtccatggctactttaagacggaagaggctaaaggttgctccatcttcatcgtaaactggtaagagcattggatctgattttggaatgtgtggagcgatttgttgaaccactgcacgttcagaaaccgtatctgagaccacttctacgtcaaattgtttgaggtaacgaagtcctccgtgaaccaattttgttgaacgactagatgttccttctgcaaagtcttgcatttcaatcaaaccagtctcaagaccgctagctgccgcctgcaaggctacaccagctcctgtgattcctccaccgataatcaagaggtccagggtacgttcctgcatttttttaattgacaattcacgtgttttctttgaaaattccatatttacacactttctaaataaatcgctttattctgccagtattagtcgtctacttccgcaaagacttgagttgctttcacagccttcttccagcccttgtagagttgttccttgcgagattcgttcatagatggctcaaagagttctcctgtctcgttcaagagtttcaactcgtccaagtctttccagtaccctactgacaaacctgctaggaaggccgctcctagagctgttgtttccaggtttttagcacgtgcaatgtcaatgcctaaaatatccgcctggaactgcatgaggaagttgttcatggctgcaccaccatccaccttcagtacttgaatggcggtctgagtatccacttgcatggtgtcgatgatatcacgcacttgataagcaatagattgcaaagtcgccttgataaagtcttctttgcttgttccacgagtcaaaccaaagacggaaccacgagcattttggttccagtatggagcgcctagacctgtaaaggctggaacgacataaacttcatcgttgttgtgagaatcacgagcgtatttttcagattctggtgaattttcaaccatgcgaagaccgtcacgaagccactgaatagcacttcctgcgatgaagatagaaccttccaaggcataataaaccttaccgttgattccgtaaccaatggttgtcaagaggttgttttcagacaactgcatctcttccccagtattcatgatgatgaaagagcctgttccataagtattcttaaccatacctggctcaaaagccaactgtccaaagagggctgcttgttggtccccagccatacctgagattggcacctctccaccgtagaaatggaatggagctgtcttgccgtagatttcggagttagaacgaacttctggaagtatagccttcggaatgttaaggatttccaaaatctcatcatcccatttgagttctttaatgttataaagcatggtacgagctgcatttgagtagtcagtcacgtgagccgcaccgtcagtcaatttccaaaccaaccaagtatcgatagtaccaaagagcaattcccctttttctgctcgctcttgagcaccttctacatgatccaaaatccaacgaaccttggtagcagagaagtaagcatcaataatcaaaccagtcttttcatggaatttttccacataaccttggctttttagttgctcagccaaaggtgctgtctggcgtgactgccaaacgatagcattgtagataggaagtcctgttttcttatcccagacaaccgttgtttcacgttggttggtaatcccgattgcctcgatttgatttggcttgacaccactttcgatgaaagcacccgcaataactgactgaacagagttccaaatttcattggcattgtgctcaacccaacctgcctgagggaaaatctgggtaaactctttttgactcgagctaaccttttccccttttttgttgaaaatgatggcacgagaacttgtagttccctggtcaatggccatgatgtatttttcttgtgacatgtactgtcctcctgataaagatcttgaggtgtttcctctttacacttactagtatacaaaataaagcgctttcttgtttatcaactttttttaatttttaaaaaaatgtgaggagattgtgtgaatttcacaaaaaagacctggattaaccaagccttttaagtgaataataactggcgaatcgctaccaaatcctccatatccaagtcattttttaaataatagactggtgtctgttccttcttatgaatcgggttattggtaaccagcaaatcataatgccgactagggtcataagcttcaatggtaataaaacgattgtattccaaataccgtttcaaaatggctgccatccttgaaaagacaagaaaaccagatgtcaaatccagaccaatccgcatatgctggccaccgttttcagccatatattcgattaactggagccattcccagagaatcttcttatctaaatctgtcccctgttgaaaagcaggtagagcatgaaaaatctcctctgctgtctctttaaaatcatgttccatcagtaaatatggatgacgattctctaactggtacttgtagcgatcctgtaaaatatagcccttatagagatagacttgagcacaaagctgactgagttcataggtgacatggtcctctgtataatcccccaatagttcctccttcttcatttcttgaatcaattgcgtcagtaaatctgccaactgccctccaaaaccaagaatatactccatagtatgaagaggaagaatgcgatgagataggagaaaagagaagaatatcatcatctcaccatcctcaactcctagtggaatatgttgcccagcaaaaaaggacggaacctttctcagcaaacgaagataaaagatattgtcaaaataccctcgcattttctcttctatgacttgaaactgacaagcattgacccgaagacgttgttgactgatgtgagcccagagaaccaagtccaatttctgccccgcagacaaacttgcaccgcagatttcctctaaattggcaatctcctgttttctctctggtttctgcatgtgaccttcccattcctgactcgaccagacctttcggaaaagacagaaatagaaatagtgaatctgatgctctggacctcgccaacggccattttggatggataaatcaaattctgacaaaatctgatttaaaccagccaagtgacgaccaagcgtagcctcgctaatcaccaattcttgagccagctgatgggctaaaaactgttggtggtagagaagataaaccaaaatctggtatttaacagcactctccaaaaacaagctccgaatatctctccccttggtagctgcaccgatagacagacgcagattttcatcttctgagtgaatagccagctctaagccactatccaaagccttgtcattgagcagggtgacatatttggttagggttgcttttgaaaatcctgtttcttccattacagccttgacggtcgtctgagactcttgtaatagaaaggaaagtattgaaaattgaccacactcggctttctccatcaaatctcctaaatacatttgttatccctttcattttctaccttaagcatagcataaatctgacaaatgctaaaataatctgtttctctttttattttcatgctgatttcctggtccattatcctgaaaatcagtaaacacacggctccccctttgggcatttttatgctaaaatagtagctatggataaaattattaaaactatatcagaaagcggagcctttcgtgcttttgtccttgatagcactgaaaccgtccgcactgctcaagaaaaacatcaaacccaagctagctcaactgtagcgcttggtcgaactcttatcgctagccagattctcgcagccaatgaaaaaggaaataccaaacttacagttaaggtgttgggatctagctctctaggtgctattatcaccgtcgctgataccaaggggaacgtcaaaggctatgttcaaaatcctggtgttgacatcaaaaagactgcgactggtgaagtcctagtcggaccttttgttggaaatggtcaattcctcgttatcacagactacggtactggaaatccttacaactctataactcccctcatctctggagaaatcggtgaagaccttgccttttaccttactgaaagccaacaaacgccttcagcggtcggcctcaatgtccttttggacgaggaagacaaggtcaaggttgcaggtggtttcctagttcaagtcttgccaggagccaagaaagaagagattgctcgctttgaaaaacgcatccaagaaatgccagctatctctactcttctcgaaagcgacgaccatatcgaagccctcctcaaggctatctacggggacgaagcctacaagcgtctttctgaagaagaaatccgtttccaatgtgactgtagccatgaacgctttatgaacgctcttgccagccttccaagctcagacttacaggaaatgaaagaggaagaccacggggcagaaatcacttgtcaattctgccaaactacttacaactttgatgaaaaggacctggaggaactcattcgtgacaaatcttaatacaccttttatgattggcaatattgagattcccaatcgtaccgttttagcgcctatggctggcgtgaccaactcagcctttcgtactatcgcaaaggagctcggagctggactcgttgtaatggaaatggtctctgacaagggaatccaatacaacaacgaaaaaaccctgcacatgcttcatatcgatgagggcgaaaaccctgtctctatccaactttttggtagcgatgaagacagcctagcacgcgcagcagaattcatccaagaaaacaccaagaccgatatcgtcgatatcaacatgggctgccctgtcaacaaaatcgtgaagaacgaagctggtgctatgtggctcaaggatccagacaagatttactccatcatcaacaaggtccagtctgtccttgatatcccacttactgtcaaaatgcgtaccggctgggcggacccatctcttgcagtagaaaatgctctcgctgctgaagctgcaggtgtttctgccctcgccatgcatggccgtacccgtgaacaaatgtatactggccacgcagaccttgagaccctttacaaggttgcccaagctctaaccaagattccattcatcgccaacggtgatatccgtactgtccaagaagccaagcaacgcatcgaagaagttggtgctgacgcagtcatgattggccgagctgccatgggaaatccttacctcttcaaccaaatcaaccattactttgaaacaggagaaatcctacctgatttgacctttgaagacaagatgaagatcgcctacgaacacttgaaacgattgattaacctcaaaggagaaaacgtcgcagttcgtgaattccgcggtctcgctcctcactatctccgtggaacatctggcgctgccaaactccgtggagccatttcgcaagccagcaccctggcagagattgaaaccctcttgcaattggagaaggcttaatagtttaaaacccgtaactctcttaaagagcctcttgaatgccgccattctttcctcatcaaaaaaactccgtagtctctagcgctataaatccggctagagattacagagttattttttaatctaaacttcctacaagggtatattatctactgaaaggatatggtatttgtagggaatactttaaagagttcttacaggaagtcagtattaactagttatattaggtttagtttacccattcaccattggcattgactccatagccatctacagttgtgttgactgcaagggcacctgagccattgacatagtaccatttatctgatactttgaaccattggcttgctttcatagcacctgatgcttcaagatagtaccaggtatctccatctttcacccaacctgtcgccatatcaccattagcgtttaggtagtaccatgagccattgtattggagccatcctgtcgccattgaaccattagcgtttaggtagtaccatgagccattgtattggagccatcctgtcgccattgaaccattagcgtttaggtagtaccatgaaccattgttttggagccatcctgttgccattgaaccattagcgtttagatagtaccatgaaccattgttttggagccatcctgtcgccatagcgccattgctgttgaggtagtaccatgagccattgttttggagccatcctgtcgccattgaaccatcagtattgtagaagtaccacataccgttttcttgtttccagcctgtttttggagtagatggttgtgctggtttttcagtttttggcggttgctgttgagtcaagcgattatattcttcttctgatctacgagcatagtcttcttcagcttgttgatcagctggtttttctgcttttggttgttcagctggattctctggttttggagctggagctggtttttctgcttttggagccggcgctggttgtggttgttcagctggtttttctttaactttatcttcttctgctgcttttcgtttagcttcttcttctgcttttttacgatctgtcttgattttttctaaccttgtagcctcagcttttttactctcaacttccgcttttgcttgcttaactttttcctcgtttcgaggttccttagcttcctcttttactagttcaagctccgcttttttaacttccacatcggactcagcaatttcaagttcaagcgttttgtaagtattggttgggtagttacggcgatcttcttctttttgatcctcggcttttttcttagcttcttcaaccttcttctcagcttctgctacctttttttctggtttcagggatgggcttggaagagtttcttcacctacgctagaatctgaagacttcgcatcattttcttttttatcaggtgttgctagctctccaggaactcctcgttttgcccgcccctttggtttaccttgctctttagcatctgctcttcgtttagcttcttcttctgcttcttcacgatctgtcttgattttttttaaccttgtagcctcagcttgtttactctcaacttccgcttctgcttgcttaattttttgctcgtctcgaggttcgttagctttcacttttactagttcaagctccgcttttttaacttccacatcggactcagcaatttcaagttcaagcgttttgtaagtaatggttgggtagttacgacgatcttcttctttttgatccttggcttttttctcagcttcttcaaccttcttcttagcttctgctaccttttctcctggttctgtcggcttgtttggcttcgctgtatctgaagcttccggtttagtggaagagtctgaacttgacgaagaagatgagtccttttcaaacttagacacagcttcatctacttttgatcgactctccatcatcagtatctgtagttggctttctgaggttgattcaactattttattcaaatactcgttcttaatgttgttcaactcgttaactagagctacagtaattgtatgtcgctttttagttgattttgcatagctctcacccactattttttttacatattcctcgacctctttccttgccttatctcgttctgaatcgagttttttaggttgttctccttgttctgcctgactttcatttgccctattagaagaagtgggtacttgggtagctccctcgttctctgtcgcatgaaccacacttcccataacaagactggcaacaactacactagctactccaacactaaatttacgaattgaataatgtacttttctttcgctttttgatgcaaacatgtttatttccttctatattttttctttaaccttactatatcacttcaatatgaactgtatataaatcgaattttgtatttatctctttatgcttccatttgggattataacttcatgtaatagcttttcctcttcagctattcgtcgatacaaaataactgcataaactggaaaaactaaaacaaaagtcacataagcatgactcaacaaggtcaagccaatcaactcaggaagaatatttaaaaagtaattagggtgttttactgtcctaaacaagatatgatctacatatttgtgattattgacaagcataagcttcactgtccaaatatctcccaacaagtgaatcaccaacatcaacatcagcatagaaaaaataagcaagactaaaccaaccatgcccatgccatcaaaaattgtcttgtgcaccattgcctcaaccaagcaagagagataaaaaacaatatgagccatagttaatcgttttgtattctcaactccaaattctttcccgccattgctaaggattcgtttctcattctctatcgaacgctttaaaaaaatcaatcgaataaagaatgttactaaaataatcgctaataccatattagtatcctttcttttatctacacaaagaataacacacttatgttaaccctatatgaactttaataaaaaactaatctgtctacaagctaatcttaaattccataccgtgttcataagggagaaaactataatccatttgatagctttctaaaatattattcacaatgtaaagacccaaaccggaactttcatccttatctgtcacgatttgagaatgatagaatatatcaaataaatgttctagttcttggtcacttagaggcgcacatgtatttttgatagagagatagccatcttgctcggatatgattacacgcccatttttatctgaatatttaattgcattactaatcaggtttgtcaaaaccttatccaatgccctaagactcatgacgaccctggtagcatctgtcaattgattttcaattgtaacacctattgaatgagctaattcttgataacgtgataaaatatctactaaaactggcttaacagtcaaggtctcacgacactctgtccactcttggaatttagaagactccagtacttcttctaataagtggctcatctggtcaatcttatttatactctttgcaatatattttggatgatctttgtaatctccaatattatgctgcatattctctaggataattctaagactggctaaaggggttttcaactcatgtgatgctccgcggacaaaggaaaccttttgattttgcaattttacaatttgctcattacgactttccaactcataaataaccttcaacaagtgctcatacataccattaatctgttttccaacttcaccaacttcatctttcctactttcatcaaaacgaatattgtcatccaaatcttgcattttactagtcacttctgaaatgtaaaaaagaggattgagcaagcgtttagtataaaaataagaaaaaacaaaggaaaaagcaattgtaaccaaaaatgtatatgggagatacaaaagcaaaatattctttgcttctttgtagacatccaccccgtgaacaaattgcacggttacctgtttaccatctgctgtactaacagacatatctaacatcacgatataatttgatagctttccatctttaatatccaagtcatgcacaagagggagccgcttatctacaatatctcttttaaggtgagcagatatggtcaaggactttgaataagactggagtaagcttggaatttcatcagatgtcttagtctttaaatactccgtaaacactcttgcgctctcattaaacttttccccctccagttgaatataataaaaaggaaaggtcaaataaatagctatatgaatgactagaccaacaccacctagaattgcaaaacttcttaaaaaagacttggttaataatttaggattttttatcataagctaatcttatacccaacatttttcacagtcacgatacaatctaaagctaattttttgcgaagagtacgaatatagacatcaacgaccctatcacaaggtaaatcagctacatcttttgaaatttcttccaatatctgctctctacttaaaacttgatttttatgctgaatcaaacactttagtaccagtaattcctttggtttgagatcaatttcttcatttttataatgtgctttgtaagaggtaaaatccactgttacatcctgatatcgccaaagatcctctatgacgtagtaacgtctgataagcgccttaatacgcttgacaagcagtaccaaagaaaaaggttttgtcacatgatcatcagcatagagatcaaatacctgtgactgagtagtttcatctcccagagcactcaagacgatgacaggaatatcgtgcttttgattgatttcttttaacacttcaaaaccactcttcctaggcatcattaaatccagtaccatgagatggatagggagatcttgaaatttttccaagacctcttgtccatccttagccataatgacatgataaccctcttctgtcagaaatgctgcaattccttctctaatcatttcctcgtcatctgcaactaaaatgttcatctctctccctttctactaccagaactccatacatctatttcctgtatgctatttgaaaatttcctaccagcctatcatctatgataatggaatggatttcatttatccgctactttttgtcaacaacaacgtcaatacaagaaaatcattcatcttgcagcttatactcttcgaaaatctcttcaaaccacgtcagctctatctacaacctcaaaacagtgttttgagcaacctgcggctagcttcctagtttgttctttgattttcattgaatattagtttgatttttcaaataccagctagaacggatttgacatgcaaaaaagaaacaggtctcttttgaaagaataaaaatttcagataagactgctctttttctactacacacgctctaagacaaatacgacggagggtaataaacatatgaattttgtgttgaatgatgaaaaccacggatcgtttagaagctataggttttagtttcatactcttcgaaaatctcttcaaaccacgtcagctctatctgcaacctcaaaccagtgttttgagcaacctgcggctagctgcctagtttgctctttgattttcattgaatttcactccactgtgacttatggtcagatgctgatacttttattcttttatgcaatatcaaattttaactggcctgctttgacaccaatcttaagtgtgctgcctgccactaaatctcccttgagaagaagttctgccaacttgtcctccacttctgtttgcagggttctgcgaagtgggcgagctcccatctctgggtcatatccttgatttgctaacaatttcagagctgaagcttgtaatttcaagtcaatgcctttttcagtcaaacttgccactaaaggcttgaccataatcttcaccacttcctgcatatgatcactagataggctatggaagaccaccttctcatcaatacggttgatgaattccggtctataagcttttttcagttcttcaaacatgcgtttttccatattttcctggtcaaaacgaatatccttagccccaaaaccaacagtcttatcatcacgaagggcagtcgcacctagattcgatgtcataatgataatggtatttgaaaaatcgaccttgcgtcccttgctatctgtcaagacaccgtcatccagaacctgcaagagaacattaaagatatctgggtgggccttctctacctcatcaaagaggagaacggaatagggtttattgcgaaccttctctgtcaactccccaccttcttcatatcctacatagcctggaggagctccgttgagacgactagctgcaaatttctccatatactcactcatatcaaagcggataagggctgattcgtcgtcaaaaagaacttctgccagagccttggctaattcagttttcccgacacctgtaggccctaggaacataaaggaaccaatcggacgcttatgactgcgaatccctgactggttgcggcgaatggcacggctaatgcttgaaacagcttgatcttgaccgataacccgtttatggagttctgcttcaagatttaaatacttcttagcatccgtttgagtcagtttttgaactgggattcctgacaagcgactcaaggtggtcaaaatatcagactctgtcaccaagtctttgtagacaggtacttcctcttcttttgcgattagctgggctgcctgtttccacttgccatccatcagggccttgtcagctggactcaaatctgaatcgtctgcttttacatgctttgccttattttgcactgttgctgccgcctcatccaagagatcgatagcagagtctggcaagtgacgactggttaaataacgatgagccatcttaaccgctgtttcaaccgcttcatctgtgatttgtacacggtgatgtttctcataagtcgccttcaaaccttgtaaaatagtcatactatctgccacacttggttcttcaatcgtcactttagcgaaacgacgagaaagtgccgcatctttttcgatatgtttttgatattcttcctgagtagtggcaccaaccgttctcaaagttccacgcgccaaggctggtttcaagatattggccgcatccagagtcgaatcaatcccgctaccagaacccatgatggtgtggagttcatcgataaagaggatgacttggccatcttcttcaatatccttgatgatattattcatgcgttcttcaaagtcaccacggaagcgtgtccctgcaacgacattcatcaaatcaagttctaacacgcgcatcttagccatttccgcaggcacgtcaccactagcaatacgctgggcaagaccaagcgccagagctgttttcccgacaccagcatccccaaccaagacagggttgttcttagtcttccggctcaagatttgaatcatacgtgagatttccttgtcccgaccgatgactggttctaacttgccagaacgcgcttgctctgtcaaatcatgcgtataatcctcgagaccaccactaggagtctgcggcatgcccatcatattggccatagaattttgcttgtcagctactgtacgatggcgttggcgtaaagccttgagatcttcacgagtccagcctgcccgttcttctaaatttcgacgaagagcagcaatcttgacctgatctttcttgtcttcataagaaaaaccagccctctccaagatacgagtcgccaaggcattgctatcatgcaaaatcgcatagaggacgtgctctgtccctagtaccttagcatggaccactgacgctacatactctgcttcatcaaaaagaacctgcaaacgacgggagaacggcaattccgtaaaggtttcatcctggctatagtccgtttcagtcagttccaaagccacctcttctaaacggtccatctcatacggataatcatttaaagttgcccctgctacactataactgtgattagacatggcaatcaacaagtgccacgactctagataacgagctccaaaatgtccagcaaccatgtaggcactttcgatacattcattcaatgcttttgaatagttcatcttacttcccttttctatctacctcttgtatgatctgacgtagcatgtttgctcgaacaactggagcttcttctcctaaaacgcgatccaaagctactgattctagcaaattcatctcctgcttggtcatcaattcctgctcaaccaaaagctggagaatatcctcataaatttcttgactgactcgctcaccaatcgagtaaagcagctcccggagcatttcatgatgactagaaaactcaatccgtcctatacgaatgtagcctccgccaccacgcttactttcaaccaagtagcctctactttccgtaaagcgtgtcttgatcacgtagttaatctgactaggaacaacctgaaaggtatctgccaactgactccgttgcaactccacgataccagattgatctaaaatcgccttgatgtaggcctcaatatgatccgatgtatttttaaatctcataacaaacccacctctctctttaaaccttgaccttgtttgactattataccgaaattttctcatttttaaaagaaaaagggcgctggtaaaggataatcttcaccaactccctatttttctacttatctaagcctaattccgccaaaatttgacgtttgtaggcaatcttttggacttccttgtcctcatcttcagaccaatctagtttaatttctgaaacaatctgcccagggcgatttttcaagatatagatacggtcgctgagattgagggcctcctcaatactatgcgtgatgatcagggttgttagctgcaactgcttgtgaatctcaagataccaagcgtggagttccatctttgtcatctcatccaaggcgctaaaggcctcatctaagagaaagagcttgtgcccaaaaaggtaggtccggagtaaggctacacgctggcgcatcccaccgctaagttcatgaggatacttgtctcttacagctgtcagctggaaggtcgcaagaattttatccgctcgggaaatagcttctgccttatccaccttttgaatcaagaggggcagaatgatatttccaagcaccgtcttgtgctccaagagcagatccttttgcaacatataactcacgcgccccttgggattttcttcaccatcaaggacaattctccctgactgaacttctaaaatcccagcgattagattaaagagggtggtctttccaacaccacttgggcctaggatggaaaccacttcgcctgaagtcacctgtaggttgatatcctctaaaatcctctcctgaccataggcataactgacgtgctctagtctaatttctgtcattatttcacaaattcgttggtgaagcctttgtctgtcaagtcttctttaaggataccattttctttatcccatttgtagaaagcattccagcgagctgcgtcaaattgaccccatttttccttgtcgcttgcgtattcttttgacaagtatttttgagattcgatgacaaagtcacgtttttccttgagttcaggtgcattcttgatgagaatatctgcagcttcttctggatgttccatggcatattggtagccttttttgatggcttggatgactttgcgagcttcttctttgttatctttcagatagtcgttgtttgcgatgataactggtgaatagtagtcaaactccttgacatagtctttcaagtacatgaagttagcatctacaccttgagatttagcaaggataccatcccaaccgtagtaaatccaagcagtatcaaagacgccattggcaatcggtgtgattgagtttgagtcgttatttggtactttttcaaccttctcaaagtctccaccttgagattctaccaaggttttcaacatagcaagttcagttgggtcattccatgtcccatatttcttaccaaccaagtcttttggactgcttacattatcagatttacgagagatgattcctgatgtattgtgttcaacaatagctgcaacggcagtgattcctgctcctttttccaatttcttagccatgtagtcttggaaatacactgcaaatggtgcctttccgttgataaccaagtcagaagaactttcttctggtggcaatttcaaatcaacatccactccagcttctttgaaataacctttttccttggcaacataaagccctgtgtggttggtatttggtgtccagtctaggataaagtcaaccttcttaagttctgcctctttgttgtctttagaagcagttccttgaccacaggccacaagcacaacagctacaagagctgttacaagcgttaaaaacactttccatgttttcttcattttgatttcctcttttctttttcagaaacattctaattctacgaacgtttccatttaatcacatatttttcactgatatcgaccagcttcatacccaaaagactgataatcgacaccagaataataatggcaaacatggtatcatactgaaacagttttttagactgaatcatataaacaccaagaccttcaaaacctcccaaccactcagataccacagttgtgataaaggcgtaggagacactgaccctcagacctgcataaaagtaaggcaggctaactgggattttaaaatgccacaggatttgccaaggcttggcccgcatcagactaaacaaggtcagcatatccttgtcgcaatgcctaaaaccgtccaaaatactaacgatgatgggaaaggttgtcgttaagataatcaagacaatcttgggcaaaatcccataacctagccacaagaccaggataggagctatggcaatggtcggaatggtctgaatgaccaccatcatagggtaaatcaggtcattgagccaagtcaaactatccatgagcacagccataagacaggcaatcaaaactcccaaaatcagccccagtaaagccactctcaaggtcgcccagctatggtgccagagaaattctctgtcacgaacaaagggctggagaatttcaagaggtgtcggcaggataaacttggggagaagtttaagaaaacctgctaactgccagattgacaatactccgagaaagcccaatagactaatgtgtcgtctcagtatacttctcaagtttctcatcaatacttaaaatctctcctacatttattttgacattggcaaagacattgtctgcctcctgccctgccacttccagcgcttcttttagaatgcgcataagctcatcaaactccccttccaagaccgtttcaaatggtgtcactaccatcgtcacttcttgagtttgcagataagcaatgacctgatcaataacagctatccgatcaatcccctgtactaggggtaaaacttgcaaggcaatgcttgctttcataagaacctcctcttctcgttttcctttttaaaaaaagaaaaacctttaccatacatggaaaaggtgcaaaattagactaagtatcgttccctccgctggcattacccagatcaggtgcggtcgaagtttaacacttcctctcagactgtacacagactcccatatattatatgtatatatgatagcgcaaaataagaaaaatgtcaaggaaactgcttacagaaaagagcaggaaatttctcctactccaattttctatactcgttctccatcactgtttactctgtagccatccaccgtcgtattaacagctaaggcgcctgaagagtaagaataataccacttaccagagacctggtaccagcctgttttcattgcccctgaactacccagataataccacaaaccattttcctttaaccatcctgtctgcatttcaccagataatttcaaataataccagctagaaccgtctttcagccatcctgttgatttagaaccatttgatttgaaatgataccaactaccatttattttcttccaaccgacagttgaactactatgggatccatagctagagatgtttcctgattgattctgataattttgtgaagaagtcactccctctagctgtatatagcgacgacttccgttataagccgtataactcaaccacttgtagccgtctttttcgagaatttgatcataatgaaccttctctccaggataatagtaatcaatcacagttgcactaactaggggttcagttttgatagcagacttggtcttaaaataatgagttccacctgttgaagaaagaacagaattacctagaggatttttattcacagcctccaattgaacataacgatagcttccattataggcagtataactcaaccacttatagccgtctttttcaagtatctgatcataatgaaccttctccccaggataatagtaatcaatcacagttccgctagctagaggttcagttttaatagcagacttggtcttaaaataatgagttccgcctgttgaagttgaggattgactattcccaacactgccaccatccaaatctttaaaatgaataaatcctgtcatcgtgtttgcttttataactcgtttattataggattctgtataaccatagttatattcctcaatctcaatctgatctcccattacatttgacacccaggcaacatgaccataagttcctgcagtagaccaagtaatggaaccaatcgtcggtgtattatctacacgataaccttcccgacgagcacgatgtccccattcattcgcatttccataagctgccggaatttcaaaaccattgacattactcaaacgaaaggctacaaaagaagtacactgacgagaatacatgcgccactgatcaatctcctggctcccatttttataataagcaggataatcatccccacgcgcaatcgatccatttcctctggaataggcatagacactatcaccagctgctagcatcaatcctactactaaaaaaggaacaagctttttaactgacatcttcaagtaataacttgttcctcttgctataaacggtaaaattttcattcttcctccttgaaaaataatataaagcgatgattgccttcacctaaattattcggagaaaaaagaaaaagtgagaaaatttctcactttagtcaagataatgaatcaaattcttttctgtaagaatatctgagtaagtaaaggattcaacgtaaacattaacttgtttatctccttccacatccccaaactccacaataaatagagatggataaacttcaattagcttacccaatctatttttttggcgcttacgaccattctccaaagtcatttctacgacttgtccctcatgtgccttgatttcttctttgatttttttcatcttggctacatctgtaaatgcatctgacatcttatgcctccctctttgagatacttgaaaatttattgtattctttttggaaaatcaattccactgttccacgagctccactacggtttttctcgataataacttccaccttattatttgggataccctcctcttcttcaccaccacgttcatagtagtcatcgcgatagagaaaagctacgatatcagcgtcctgctcaatagacccagattcacgaatatcagacaagaccggtctcttgtcctgacgttgttctacaccacgagaaagctgactcagagcgattactggaaccttcaattccttggctagtattttcaactgacgagaaatttcagaaacttcttgttgacgattttctcgaccagttcccgtgataagttgcaaatagtctatcaaaatcaaaccaagatttccagtttcttgagccaatttacgagaacgagaacgaatctctgtaatccgaatacctggcgtatcatcgatatagatactggcgttagctagattaccctgagcaatagtatatttttgccactcctcatctgtcaattgccctgtacggatagaatgtgactccactaagccttctgcagctaacatacgatctaccaagctttccgcacccatttcgagtgaaaaaatagcaaccgttttgtccaacttagtcccaatgttctgagcgatattcaaggcaaatgctgtcttaccaactgctggacgagctgctaagataatcaactcctcctcatgaagtcctgttgtcatatgatccaaatcacgataacctgtcgcaatacctgtaatatcggtcgtttgttgcgagcgagcttccagatttccaaagttgagattcaacacatctcgaatgttcttaaacccgcttcgatttgcattttcactgacatcaatcaaccctttttctgcctgagcaataatttcatcagctggttgtgacgcttcgtaagcttggttgacagactctgtcaacttggcaattaaacgacgtagcattgctttttctgcaacaatcttagcataatactccgcattagcagaagttggcacagaattaacaatctcaaccaagtaagacaagccaccaatattctgtaaatcaccttgattatcaaggatagtacgaaccgttgttgcatctatggcatcaccacgatcggataaatcgaccatggcttggaaaatcaaacgatgggcatacttaaaaaagtcccgagactcaatgtattctcgcacaaaaacaagtttactctcatcaataaagatagcccctaaaacggattgctcagctaagatatcttgaggttgtactcgtaactcttctacttctgccatcagacttcccttccttttacaatcttgtcaagaaggtgtaaacttatccttctttcacacgaagattgattacacttgtgatatcttgatagattttcactggcacatcaatcaaaccaaccgctcgaatcggagcttgtacttgaatatgacgtttatcaatcttaattccaaattgcttttgcaattcttctgcaatcttcttattggtaatagaaccaaaggtacgaccatctggaccaactttttcaacaaattctacaacagtttcttctgcttcaagttgtgctttaattgcttttccttctgcaatcatctcagcgtgagctttttcttccgatttttgtttaccacgaagttcacctacagcttgagcagtcgcttctttggctagattctttttgataagaaagttttgcgcataccctgttggtacttccttaatttcgccttttttaccttttcctttaacatctgctaaaaagattactttcattcttctttctccttttccttcatttcatttaatacaatttctgtcagtttttcacctgcttctgacaaggttacatctttaatttgagctgctgccaaattaaagtggcctccaccgcctaactcttccataatccgttgtacattcagtttactacgacttcgagctgagatagagataaatccttgtgtattcttcgcaagaacaaaactcgcttcaatacctgacatggctaacatggcatctgctgccttactaataacaactgtatcatagcatttcatgtccttagcctctgctattagtacatctgaacctaatttacgcccctgtaaaataagttcattgacctcacgatattcttcaaaatctgtcgcagcgatttcctggatagcaatactatcacttccgcgcgttctgagatagctagcaacatcaaatgtccgactagttactcgcgaggtgaaatttttagtatccaacatcataccagccatcaagacacttgcttgcatacgactcaaacgatttttcttagaattctggaactgaatcaattccgttaccaactcactggcactacttgcaccactttcgatataagtaataaccgcattatctggaaaatcctgatcccttctatggtggtcaataacaatggtttgggtaaataaatcataaaattcttttgataatgttaaggctgtctttgaatggtctacaagaatcaacaaagaacgattggtcaccatccccattgcatccttaacagacaacaacttcgtaactccttctttttctatgaatgaaacagctcgttcaatatctggagacatttgttcttcatcataaagagcatagctattttcaatcacattgctggcgaacaactgcatacctacagcagagcccaaagcatccatgtctaaatttttgtgaccgactacaaaaacctgatctacactccgaatcttatctgaaatagctgtcatcatagcgcgcgtacgagtccgtgtacgcttgattgaagcagcagacccaccaccaaaataaactggatttttcgtttcgtcgttttccttaacaaccacctggtcgccaccacgtacttcagccaagttcaaattgagcaaagcaactttccctatctcatcatgatttccatcgccataagaaaatcccatacttaaggtcaagggcaactgtctctgtttcgactcttctctgaaagcatcaataacagaaaatttatcattcatcaagccctcaagcaccgtgtagtcagtaaatagataaaatcgatccatacttacccgacgagaaaacatcatgtgtttttctgaaaactctgatataaaattagctacaaaactattgatttgactaatatctgactcagaagtttcatcctccaaatcatcataattatccacagagacaatcccaatcactggtctacttgttaccaattcatctgttatggcttgttccctggatacatctacaaaatacaaaacaccggaagaagcatccatatgaacagcataacgcttctcaccaagcttggcataagtagacggatttcctactgaagccttgataatcgtttgaacagcttctaaatcaaaatcaccatcttccttggtcaaaatcaattcagcatagggattaaaccactcaacctctccagaagataaattcaatttcataacacctacaggcatctgttccaatagagctgtcaaactttcttccgcttggtggtttacatactgtatctgttctacatcactccttgtataatgcactctcagtttcttaaataaaaaaacatagcctcctacaaaaagaaacaaaattaaaaccgtcaacagattattattaacaaaaataatgaaagtggataagactccaaacgcaatcaatcctactagaataggaaaaattggacttacataaaattttttcattcaaaacctcttggcacccattataccataatacccctcaaaaagcgactttttaaaagtgtaatcagtaattctatcaattataagaaaaaggtagtttacaattcagtaaacctacctttacacatattgaaattaagattctttaacctctaacaaaccaatttcgccatcctcacgacgataaatcacattggttgtctgatcttcaacatccacatagataaagaaatcatgccccaataaatccatttgtagaattgcttcttccaaatccattggttttaaatcaatttgttttgaacgaacaactttagactggacaatatttgaatcttccaccaaagcatctgtaaataattgaccagttgctaccttatttttatttttacgctcgatttttgttttatttttacgaatctgacgttcaattttatcagttacaaggtcaattgaaccatacatatcttgagatacatcttctgcgcggagagtaatagatccaagcggaatcgttacttccactttagccgttttttcacgataaacttttaagttaattcgggcatccaactcttgttctggttggaagtacttttcgatcttttcgagtttagaaactacataatcacgaattgcttctgttacttctaggttttcaccacggatactatatttaatcatatgagtaccttctttctaaacatttttgtttttatgattttattataacgctttcattctatttttgcaaattttttcctcatcttacaagggaaaatgtttttacatccttagcaccagcttcttccaacagtttcttaacacgatttatagttgctcctgtagtatagatatcatctataagtaggatttttttaggaatagtgactccacttttaataaagaaaggaagttctgtccccaagcgctctgaacgatttttagaagaactggctctctcttctcttttctctaataaatccagatactcaaagcctgctgcctctaccaagccctcaacctgattaaatcctctattagcatatctatcaggacttaggggaattacaacaaattgatactctttgtactttttcaactcctcacttaaaaatgaagcgaaaacttttcttaacaggaagtctccatcaaacttataccgactgaaaaaatccttcatagcttgattgtaagtaaaaatcgctctatgactgacttcaactccctctttacaccaaagttgacaatcttgacactttgttgacaactctgttttcatacaatttggacagttctcttccccaattctttcaaaagtagaatcacagtctgaacaaagacaagagtcatcattcctcagaagtaagagactactaaaagttaaaacagtcttcatagtctgcccacataacaagcacttcatagaccagcctccttattcatcatctgaatttccttaatcgccttcttgattgaagcatttaacccatcatggaagaaaagcaaatctcctgtcggtctatccatgcttcgtccaactcgtccaccaatctgaatcaaactagacttggtaaacaaacgatgattggcctctactacgaaaacatccacacaagggaaggtaactccgcgctccaagattgtcgtactgataagtattgtcagttctccatctcgaaaagcttgtacttgctctaatcgatcctctgttacagaagatacaaagccaattttctcatttggaaattgctcctgtaagatttctgctaactgctcccctttcttaatttctgaagcaaaaatgagtaacggataagctgtctttctctgcttctcaatataggactttaactttggtgacaaacgattcttgtctaagtagcgattaaaatccgataaccaaattggttttggaataatcaacggatttccatgaaaccgtctcggtaaattcagtctttttagttctcctaaacggacctttttatctaactcattggtcgaagtcgctgttaaaaagattctcaatccattctcctttacactattcttgacagcgtggtaaagcatgggattatcaacataaggaaaagcatctacttcatccactatcagcaaatcaaaagcttgataaaacttcaataactgatgggttgttgcaacaactagtggtgttcgaaaataaggttccgattctccatgtagcaaagctatcccgcaagaaaaatcctgttgcaggcgcttgtacagctccaaacaaacatctatgcgaggactagccaaacacactgcaccacccgcattgatcactttagccactacttgataaatcatttctgtctttccagctcctgttaccgcatgaactaaggttggcttttgcttgtctactacttgaagcaatccctctgacaccttctcttgaaaaggagttaattggccgcgccatttgagaacatcttgctttggaaaatcctcctgcggaaaatagtataaagtttgatcacttctgactcgcttcatcagcaagcactctcgacaatagtaagcaccgatgggcaaataccattcttctagaatagtactattacagcgttgacagaaaagtttccccttctcctttctcattgctggaagtttctccgccaactgacgttcttcttctgttaattcattctcagtaaataaacgaccgagataatctaaatttactttcatacttctttattcgtaaaaactagcactttagatgattttttagtacaattaaatcatggaatttaggacaattaaagaggacggtcaagtccaagaagaaatcaaaaaatctcgctttatctgccatgccaagcgtgtttatagcgaagaagaggctcgtgacttcattactgccatcaaaaaagaacactacaaagcgacacataactgctctgccttcattattggagaacgtagtgaaattaaacgtacaagtgatgatggtgagcctagtggtactgctggtgttcccatgcttggggtactagaaaatcacaatctcaccaatgtctgtgtggtcgtgacacgctactttggtggtattaaactaggcgctggaggactaattcgtgcttacgccggcagtgtcgccttagctgtcaaagaaattggtattattgaaataaaagaacaggctggcattgctattcaaatgtcttatgctcagtaccaagagtacagtaacttccttaaagaacatggtctcatggagctggatacaaactttacagatcaagtcgatacgatgatttatgttgataaagaagaaaaagaaactattaaagctgcacttgtggagttttttaatggaaaagtcactttaactgaccaaggtttacgagaggttgaagttcctgtaaacttagtgtaaacaatgaataatacagcgtttcgttgacattctcacaactactttagcgagcaaaataaaaagaggcgtaccaaaatatactagaaaatgaagcaattcaaacgaaacctgatatcgttttccttcacacctatttactagaattagctgaacgcaatcacttgaaaattaatgactttgatctatgatatatagaaatggtatggatagcgttatactaaagatatcttatacaaagaggtattcatatgtctatttataacaacattactgaattaatcggtcaaacaccgattgttaaacttaacaacatcgtgccagaaggtgctgcagacgtctatataaagcttgaagcatttaatcctggttcatctgtaaaagaccgtattgcccttagcatgattgaaaaagctgaacaagatggtattctgaaacctggttctactattgttgaagcaacaagtggaaacaccggtattggactttcatgggtaggtgctgctaaagggtataaagtcgtcatcgttatgcctgaaactatgagtgtagaacgacgtaaaattatccaagcttatggtgctgaactcgtcctaactcctggtagcgagggaatgaaaggtgctattgctaaggctcaagaaatcgctgctgaacgtgatggtttccttcctcttcaatttgacaatccagctaatccagaagtacacgaaagaacaacaggagctgagatactagctgctttcggtaaagatggattagatgcctttgttgctggagtaggtactggtggaacgatttctggtgtttctcatgcactcaaatcagaaaattctaacattcaagtttttgcagtagaagcagatgaatctgctattctatctggtgaaaaacctggtcctcacaaaattcaaggtatctcagctggatttattcctgatacacttgatactaaagcctatgatggtatcgttcgtgtaacatcagatgacgctcttgcactcggacgtgaaattggtggaaaagaaggcttccttgtagggatttcctcagctgcagctatctacggagccatcgaggttgccaaaaaattaggtacaggtaaaaaagtccttgccctagcaccagataacggtgaacgttatctctctacagcactttatgaattgtaaccgtccaataacgaagtctattgaaaaatctccagactagagaactcacggatagttcctaatctggagatttcttatttgcacttttcttgtacaactttagtccatggtaaataggcctctaaaacctctttgtttacgagagtttccacgtttggaagacattctagaagataggatagatatttctcactatttataatggattgaaataagatatgaacaaatcgattagaacatgatggtaaagcgtaatcccttgtttctcagctttcccagacaaaaaagtccaatagtaagtcagctgactatcactctctagcaccctataagaagtttcatccgcatgaagtaagggctgagtcaatagtctctctcgcaagaggttataaaggggctccaaatagtattgactcgtcttgatatgccaattagagatttccttacgtgtgattggtaaacccatcctagcccaatcttcttcttggcgataattgggtaccttcagattaaacttctgatggatggtgtgagcgataatagaagctgagccaaagttatgcgctaaaggggctttaggaataggagctttcacaagcttatccagatgattatcttttactcgttatggacaatgctatatggcataaatcaagtaccttaaagattccgactaatattggctttgcatttattcctccatacacaccagagatgaaccccattgaacaagtgtggaaagagattcgtaaacgtggatttaagaataaagcctttcgaactttggaagatgtcatacaaggactggagaaggaggtgataaagtccatcgttaatcggagacggactagaatgctttttgaaaacagatgagtataaaaagaaagtcctcatttcaatagaaatcacgactttctgatgaatttatagtaaaatgaaataagaacaggatagtcaaatcgatttctaacaatgttttagaagcagaggtgtactattctagtttaaatccactatatttggggagtgatagaaaagcccttcatcagccaatctacttgttcaggtgcgagagctttgacatccttttctgtactggaccaagtcagttttccgttctcaaagcgtttatataatatccaaaatccttgaccatcccagtaaagaactttaaagcggtctttacgtccaccacaaaagagaaagacttgatcggagaaaggatccaattcaaagtgggttttaactacataggctaatgagtctattccctgcctcatatctgtcttgccacaaacaaggtgaacttgacctaaatcacttagttgaattatcatagtacaatacctttcctccgataattattttttatctggtatactggaagttggggaattaggatagataccttgttatgacgcgcttactatgaatttgaagtatagtctcctaaatgcacttagcccttattatagggctttttgttttaattattctaatcgagtgagactggggaaaaaacaatttcaggaaaaatctaagccctatacaaaaaaggaagcaatttgcttcctttctattattagttattcaaggctgctgccattgtagctgcaacttcagcttcgaagtcgtttgcagctttctcgataccttcaccaacttcaaagcgagcaaactcaactaccgaagcgttaactgattcaaggtatgcttcaactgtcttgctgtcatccatgatgtaaacttgtgcaagaagtgtgtaagcttggtcaactttagtgttatcaagcatgaagcgatccattttacctggaataattttgtcccagattttttctggtttgccttctgcagccaattcagctttgatgtcagcttcagcttgagcaataacatcatcagttaattgagcttttgatccatacttcaagtgtggaagagctggtttattaaccattgcacggctttcgttgtcttggtcgataacgtgattcaattgtgccaactcatctttaacgaattgctcatccaattctttgtaagaaagaactgttggtttcatcgctgcgatgtgcattgacaattgtttagcaagtgcttcgtctccaccttcaacaactgaaataacaccgatacgtccaccgttatgttggtatgctccaaagtgttgtgcgtctgttttttcaatcaatgcaaagcgacggaatgagattttctctccgatagttgctgttgcagatacgtatgcagcttcaagagtttcacctgaaggcattatcaaagcaagagcttcttcgttgttagcaggttttccttcagcaatgactttagctgtagtatttaccaattcaacgaattgagcgttttttgcaacgaagtcagtttcagcgtttacttcaataactgctgcaacattaccgttaacataaacaccagtcaaaccttctgcagcaacacggtcagctttcttagctgccttagccatacctttttcacgaagcaattcaatcgctttttcgatgtcaccgtctgtttctacaagcgcttttttagcgtccataacaccggcaccagatttttcacgcaactcttttacaagtttagctgtaatttctgccattttaattctcctatattttttgaaaataggagagccgggctaagccccgccctcctaggtaattactatttgtataaattaagcgttgtcgccttctacaacttcaacgatttcttcaattgaatctgcttgagtttctaaagctgcaaattctgcttcaactgctactgcatcctcaccttgacgtccttcgataatagcgtcagccaatttagctgtgatcaatttaacagcacggatagcgtcatcgttagctgggatgattacatcgatatcatctggatcagtattggtgtcaaccatcgctacaactgggattcccaattttttagcttctttaacagcgatttgctctttatgtgggtcaactacgtacatcacatctgggatacgaggcatatcttcgataccgcccaagaatttttcaagacgcgcacgttgtttgttaagaagtgcaacttctttcttaggaagaacttcgaaagttccatcttcttccatacgtttaatttctttcaaacgagcgatacgtttttggattgttccccagtttgtaagagttccacccaaccaacggtggttgatgaagtattgacctgaacgtactgcttcttcagcaactgcatcagctgcttgtttcttagtaccaacgaacaatacaactgcatcgttagctgctgcatcacgcatgaagtcgtatgcttggtcagcgtattttacagtttgttgcaagtcgataacgtggattccgttacgttcagtaaagatgtacttagccatcttaggattccagcgacgagtttggtgaccaaagtgtacaccagcctcaagaagttgtttcattgaaattactgccatgagtatttctcctttttgtttttttcctcttcttgacttcaactcgcaaaacgacccaagggcaactgcttcacaattcatcaagaatgagtattatcgttcacacgacaattttcattctaccatacttttccaatattttcaagctattttgatataatttttaatagggattgtcacggtaaaacctgaaaagagggctctattcgagtccctctgtaaattaatctgcataaatatatgtaacaaaaccttcagaagttgttgttggattgaaccatccacggtgatttccaattgtacgattacctgcataatttgattctgatacttggatacgtgttgttgattcaacagctgtaacaaccgctacgtgaccatatccaccatcattccaacatgcaattgctccaacttgaggtgttgaacctgtacggaaacctgctgctgctgcacttgtagcccactgtgctccattaccccagtagtctccagcccaaggtgccaatgtttttactccccatgtacattctccaattggataacttgaagcgtttgtactgtatgttggacgaacttttgcacggacaggtgctgctgcagattcagatactgcttgcacttgagctgttaagttagtgtttgctgaagcaagtactgattgttgttggctagctcgtttttctttataagctgcttctgctaccgcagctgcacgagcctctgcctcagctgctgctttttgctctaatagacttgctttttccccttcagctgtcgctttctcagcagcaagacttaattcagcagcttttagttctgcctgtttcgtagtcaatgcttgagcatcatcagccaatttttgttgattagcaattacagtattgatagcatcattatttgctacttgtttttcagaaatagcttttttatctgccttttgttgttctaacattttgttgtttgcagatacgatttcactcattgcagcaacacgtgaaatagcttctgtaattgattttgagtttacaatggtattgatatagctagttacggctccatttgtttgagcactacgagcttgtttttccaacgattggttacgagaaacaatgtttttagaaagttctgtaatctcaccctcgagtttcttagattctgcttgtaatctatcattttcagcttgcaagttagactgctcagcttgaatagctgatacttgctcctgaatttggtcaacttgtttttgggcttcttgttgttgtgctgttaagttactaattttattatcttgagcagcaattttgtcatcagtcgtttctgcatgcgcagttgttaaaacagctacttgagaaaccattactgtacttaataaaagtgacgctaagatttttttcttcatattacgtagatactccttcttttaaagacaatactagtataccaaaaaaaggcctaataaatattacgcctttgttacatttatatgtcgttcttatagataatatttttcaaaaataaattgaaaaacagtaatccataaaaaatttaaaatcatcgtcggtaccaagctatagactataaaaatcgacatgctatctactgtcaaccctaccataaaagccaaaagataactacccatttcaaacaggaatgtcagcacaatcatagctagcattcttgtccaacgattcaacaaaataacactattcaatttatgaaggaaggctcccaataagataaataagagagttgtaatccctattagatggaaaaagtaaacatcataaaccaagcctataacaaaacaatagactaggtagagatactctgatacttctatcgtctcaaataagagaaatagaaaaagaaaatgactagccaaatgtacatgggggaaaaatgagcccagaagctggctaatatgggcgtcaattagaacaaagaaaggaagcaataaaaatactccaactcgcttcaactgtctcattatgaattccccactaattctatcacatctacattatgagtatctgcactcaatttaacagttacttctcgtgtcaaatagtctgtactatgcgttgtggcaaccacttcaccaacaggaatatcagcaacgttaaagtttcctaatccaccagtagtcaccttatctcccgcactaatatcgctattactatttaattggctaattttaagaacgtcattttccttgtcatagccaataataattccataaattgtagtagagccatgttgaattttaacagaaatcttatcagcattttccgtatttgtcagaaggttgactatagtagagttctcctctacttttgaaacactcccaatcaagccaccatttgcaatagctaacatgttctcagaagcaccttttgatctacctgcatctaaggtcaactcctgcttccaagataccggagaacgcataataacatctgctgctaaagtctttgtggcttgcaatttagacttcatatcaagcaattggcgcagttgttcattttctgtctttaaactttccacctcatttgatttaacttctaattggtaaagctgtttcttcaaactttcattttcattatatgttcgtgtcaaatgagccaaatctgatttgacagaatcaaaccactgaaaaggtttttgtacaactctatcaaccaatgagattccatctcctaattttgtcacaattgtacttgaataagtcgtcgctaagagagctgacacaagcagaacagtgacaaaaacaataatgacatattttgattttttaaaacggttcatatccctacctttatatcaaaaactgttacagtaactttttatcaattcctgaaagctactaagattttaagaaaaataaacaacaaccaagtacgagaataacaagaatggtcagcgtatcctttagagtccatttcaattgtcggtattgacttctgccttttccaccctgatagccacgcgcttccatagcgatagccaaggaatctgcacgttttaaacttgtcgcaaaaagaggaatcaaaatgggaatcatcgcctttactttttgaacgatgcttccttctccaaaatccactccacgagctttctgtgcattcataatccgagtcgtatcatccatcaaggttgggacaaaacgcaaactcatagacagcatcaatccaatttcatgaactggaactttcacacgctttaaaggtgctaataaagcttcgacagctgatgccaaacttaaaggcatggttgttaaggttaacaaagttgaaaagaaaataatcaatacaaagcgacaaaaaataatcccagcttgttgcaaagcataatccgtgattctcacaaacgaaaactcaaataaaacattcccattagaaatgaaaaatagttgaaaaatagttgtgaaggcaatcaagaaaaacatagacttcaagccctgaataaaaaatgaaagagatactcctgacaaggcaataaatatccctgtcgctataaaaagaatcagattcgtcaaggggttattagcccaaaacacaatcaaaatcagtagcatcatagcaagcaatttgctacgtggatccaatcggtgaacaatcgaatcccctgggatataacgccctaaaatcatactatccatttagcgactccttgaactcctctatcttaatcggtaatcgtttaaatgacacgcctctatcagccaatcgtttacaaaaggccgtaattttaggtactcccaactgaacttcttccataaaaacaacgtcttgaaagacatcacttggtttgcccccctttactaaacgtcccttttccattacatagacttgattcgcatattcagcaacatcatccatcaaatgcgttaccaagacgatggtcatccctgactggtggagttttttgaacagggtcatcaactcttttctccctagaggatctagaccagctgttggctcatctaagactaatatagctggctccatggcaagtatgcctgcaatggcaacacgtctcatttgtccccctgacagctcaaacggactacgatcaaaaagtgattcatcaattccaaccagagccagtttctcacgcgcagtcttcacagcatcttcttcagaaactccaaaattttgcggtccaaaagcaacgtccttcaaaaccgtttcttcaaaaatctgattttcagcaaactgaaataccaagccaacctgttttctaatttgacgaatatctttatttttagaagtcgaggtgattaaggtatcaaaaaccctcacactcccttgacttggcaccaataaaccatttaagagttgtaaaatagttgatttaccactacctgtgtgcccaattaaagctgtataagagccatcttcaatcgtcaaagaaacatccgacaaagctgctgaagctaagggagtaccttcttgatatgtaaaattcacattttctagagcaattcccatagcttatcctctagctcactttctgtcaaataattttcaggtaaatcatagccattctggctcaaagatttttttaattgattagcaaaaggatcgtctaatccaatttgatctaaatcatttcgagagaaaagctcccttggactactagttgattcaatttccccttttttcatgaccaatacgcgatcactcatggcgacttcttccaaatcatgggtaatagaaatgaccgtcatatcatagtcttttcgaattccttttactgtcccaataagttctctacgcccctcaggatccaacatactcgttgcttcatctaagattaaaatagctggtcttagggctacaacacctgcaatggccacacgttgcttttggccacctgatagacgcgctggctctctctttttaaagtccaacatgccaactaaagccagagcttcttccactctctttttcatttcttgacgagaaagtccctgattttccaaaccaaaagcaacatcatcttcaacagtcgctccaacaaattgattgtctggattttgaaaaaccataccgatttgacgacgtatattccaaacattttcctcagtcaaacgttggccatcaattacaatctctccggattctgcttccagtaagccatcaattaatcgaaccgtcgttgatttaccactaccattatgccctacaatcgaaagccattctccacgtttcacgtgaaacgtaatatccttcacatcgtagtagttctgattttctttatagcgaaaagaaagattttttacatcaattattgatttcatttcgaaccaaatgtccctttaaatacataggcactacccttgaaatagtcatagccagagtagatagtgaaaaataaggctacataaagtagaacttgaccaagcaaagtccaatgtaatagcaagaaaataatggcaaacatctgactaaaagttttaatttttccaggcattgctgctgctaaaattgttccaccagtttcaaccaataaaagccttaaacctgtcacagctaactcacgacagataatcactgcaacaatccaagccggagccatacctaactcaatcaacataataaaagccgacataactagtaacttatccgccataggatctgcaaatttaccaaaattactgaccacattccatttacgagctaaatatccatctaaatagtcggtaatactggcaacagcaaagataatagctgcaactatatgactctctatcgaatttcctatcgttaaaataaagataaaaataggtataaagagaattcgacctattgttaagagattgggaatttgttcttttttcattcgtttttccttaatttttagtaaaggttacagtgatttgtccagtctgagctgttaatttcgataaatcaacagtctgattatctactgtcaaatcaacaccttttacaacacctaacgtaattgttacaggacttttagttgcaactgttgcttctgcacttttcttctttggcgataaggttacaccgccctcaagttcgctttctgaaacactgacccaacttgtaacatctgaaactgccaattgcaatttaactgtttccttacttgtcttataagcgatttctacatgatttccttcgcctgatacacttatagctgattctatactagaagaactactacttgaggagtggggaacagagctagttgaacttgttgattgaaccacactgtaattagaaagagaaggctcctctggttgagtttgaatatagttccaaacataataagtcacaaaaattaaaatcgataaagcaaaaaggataaaataaaataaaggtaaaaatgatgtttttttcttctttttcttacttgaacgtctacgacctgtcaactcatcttcatcaacatctacttcctcataagtaatcatactcccagaatcataagcatccaaaacaatttggtcatctaactcaacagcccatgcatattttttcaagaaagaacgcgtgtaaaaaggacttggaagttgatcgaaatcgtctgcttccattgcttccaacatatctaactggatttctgtctttttctgcaattcatctaaactcaatccctgattgattctagctaatcgtaaaacctctccaattgttttttttctcatacttgtcatcccttctttctagtgtctattataataggttactacgatgggaatattgtaaaatcaactatgtcaccatcatctattaaatgatgtccagcatcaaggacatcctctaaagtaatttcctgtaaaattttcggcaaatcaaaaattatctcaccattttcaaaagcatcatattgcgttgcaataaattcaagagagttcatgctactgaaaaattcgccaaacatctctcttttgataatatctaaatgttcctctgtaatatctaaatcctttgtaaaattacgaatagccttcctaaattgatgagacaaagcaactggctctttcgtatccattgtcaacatgacaaaatgaaagcgacttgttatttcaacttccagagataaggacgcatcaattttacctgattcataacatttttgaaaacgatccgaagtccaaccaaacatcattgcaaacaataattttaataaaatatgatgtcgatagcaatccgcttcagaaacttctcgcttacctctaactccaatcgctagtttgggagaagatacttccattctcatactatctgttggctttacaggctgtaaaaacaacttttctcttgctacttcctgaaaatctgaatctttcagttctttgctttcaaaatagtcctgtactcgctccacatcaaaattaccaactaaaaacagagacatgtttacaggtttgtaaaactttgtaaaattttcttgcaaattagttagattgatttgggaaatggactcctcacttccaactatatcagttgctaaaggtgtaccaggatacaaattcgctaaagttgaaaagaataaacacgaatctggatcatcttggtacatttctcgttcttgctgaataatatcctgctctgtcagaatggaagcttcagtaaagtgtgctgatgttaccaattcatcaagtaaatctaaattttctaaaaaataatccgttgctgaaaaaagatagtttgtttttgtaaagcttgtaaaggcattactatctgcacctagactcgtaaaagccgacatcaaatcactagaatcttctctctcaaataatttatgttcaagaaaatgagcaattcctccaggatattgttttacatctccgtcaacttctgtgacaaacgtatctaccgaaccaaactgtacagtgacactcccgtaaacctctttaaattcctttttaggcaaaagagcaactgtcaatccgttggccaaacgagttcgataaaccatttcttttacagctggatagtatttttcttcaaaaacaacctttgtcattctattccttccataaagtaaatcgcttgtagtttcacattattagctactctacaaatagcatctttgtcaatttgttcaagctttgcaatccaacttttaaagtctgctgaagattttccaaataaggcattttgataagcacgttcaatcaatgaagattgattatcttgagaaagtaacaacgaccaacgaatcatttccttggtctgatttaactcaaactctgtaaaataacctttttttaaatcaagcagttgattattcatcattttacgagcctggttacgattttctcgattgataccagcatacatcctcaagaatccactaaataaatcaagctcacttgaaatggtataagctaatccagcattttcacggacatttgtaaagagcttagagtgagcaaatccaccaagtaaaccattcattacaatcatgggtaaatgttgctcatcaccatatttagaacagtaatgataacctaattccaaaatggattgtcccacatttttccgaaccataccttcctgaaggatattagaataaggttgacaatactgaaccttcacatctccttttcgacctttaaagccaaatgattctaatacattttgaatttcaacctcattaaaatcacctaggaaaaagaaatctattcgatcattggctaaaaattcttggaaacaagaataagaactttgtggagtttcagctaaaatacgatttcgtaaatcactatattccaattgaagacgttcatcatgaaaaaacaatttatccaattctttatgtgcaaaataaaaagaatcatccatatcagctgctaaacttgctagcaattgttttttctcaatttcaaataaggccggatcaaacccattatcaactactacgggtgaaaaaagagtttcttttacaagttccaaaatctgagaggttagcacgtttttcctacttaaaaactcatcacgaacataggtaaatgtcaattctataatgtggctttgccctcttctgaaacaattggttgacatatctgtaccgtatagactggccaagtgtctcctcaaatcttgagaagtggggtacatctgattagcagtctctagcatacttgcactcaacatgtgacctgcaatcgtatcaagggataatggagcggtaaaacgcacggtaattttgtttgttttaaacttttttgattggataaaatgtgttgaaattccatgcactaactccatgatttacctccttatatacagacttctattatatcacgaaaacctgaaattttcttgttccctgtaacacttttgaaataaaaatcgcttacatttctcgctgtctctctcactatttttaggaaaatatggtataataccaaagattgaggtgaattatggaatacaaattatttgaagaatttattaccctccaagcactattcaaagaacttggaattacacatagcggaggagctattaaatcatttctctctgaacattctgtttactttaatagggaattagagagccgtcgtggaaaaaaacttcgtattggcgataaagttgacatccctgacatgaacattgacatcttgttgacacaacctacttctgaagaacaagatgaataccaagctgataaagttgaaaaagaacggatcgctaaacttgtcaaaaagatgaataagggagttaaaaaagacaaatcgaaacctgcttcatcacctaaaagccaacaagctccacgattccctggtagataatcatgtggctacaacatctatctctcaagacttttcgtaattacaaagaaacgaaaatagactttaatcctaaattgaatgtctttttgggacgtaatgcacaaggaaaaacaaacatgttagaggctatctattttttagccttaacgcgtagtcatcgaactcgaacagataaaaatctcattcattttgatgaggaacaacttcatctttcaggtctcgttcagaaaaaaactggatccattcccctagaaatcgaactaacacaaaaaggtcgtgtaacaaaagttaatcacttaaaacaggcacgcctttcagattatgtaggacacatgaatgttgtcttatttgctcctgaagatttacaactaattaaaggagcaccttcgattcgacgaaaattcattgatatggaacttgggcaaattaagccaatctatttatctgacttaaccaattataaccacatcctaaagcaaagaaacacttacctaaaatcagctcaaaaaatagatgaaacattcctttctgtgttagatgatcagctagttgattatggatgtcgtgtaatgaatcaccgcttagatttcataaaaaaactagaatcatttgggcgtaagaaacattttgaactctctaatcagatcgaagagttgtcaatatcctatcaatcttctgtcaatataactgacaaacaaaacttatccgaatctttcaaaattgctttagaaaaaagtagatccagagatttatttaaaaagaatactggtgtcggtcctcatcgagatgacatttctttttatataaatgggatggatgctagtttcggaagccaaggtcaacatcgtagtctcgtcctctcgataaaattagcagaaatcgaattaatggaaagcattaccacagaatctcctatattactgcttgacgatgtgatgagtgaacttgacaacactagacagttaaaattattagaaacgatttctcaatcaatccaaacctttatcacaacaacaagcttagaccatcttcaaaatctgccagaaaatctaagtatcttcactattcaggatggtaaagctgctgtaaatggaaattgacaacattgtaaaagaactcctgttttcactggagttcttttcattgttttttacatagaataatttggtgcctcattagtaatttgcacatcatgaggatggctttctttcaaaccagcaccagacatttcaataaattgagcattatcgtgtagttctttaaggttagctgcaccacagtaacccataccagagcgaataccaccaatcatttggaaaacaatatcagctgccgctcctttataagcaacacgaccttcaattccttctggaacaagcttgtttgcttcattgacagaaccttggaaataacggtcgcttgaacctttcttcatagcagcaattgatcccataccacggtaagtcttgaatttacgtccttggaagatttcagtttcgcctggagcttcatcagttccagcaaacatagatccaagcataacagcatttccacctgcagcaagtgcttttacaatatctccagaatacttgatcccaccgtcagcaataatcgttttaccatattcgcgcgcaacagctgcagcatcgtagatagctgttacttgcggaacaccaacaccagcaatcacacgagtagtacagatagaacctggtccaataccaaccttaacaacgtctacacccgcttcataaagggcacgtgcaccttcagcagtagcaatatttccagcaatcaaagtccgatctgggaaatgagcacgaatctcggcaattttacgcaagacacctgcagaatgaccatgtgcagtatcaataacaatcgcatccgctcctgcctcaaaaagagcctctgcacgttcaaatgtatctgaagtaacacctactgcacctgcaactagaagacgaccaaactcatctttagccgcatttggaaactcaataactttttcaatatctttgatagtgatcaaaccagaaagactgccttcttcatcgaccaacggaagtttttcaatacgatgctcttgaagaatactctcagccgttgcaagatccgtacccacaggagcagtaacaagattttcactagtcatatggtttgaaattggttgattataatctgaaataaaacgaagatctcggtttgtcaaaataccaaccaatttacgattttcaagtgtttcaacaactggaacaccactgatgcggtaacgacccataagctcatctgcttcagcaattgtatgttcaggcgtcaagaagaacggatcaataataactccattttcagaacgttttaccttacgaacctcgtctgcttgttgagcaattgacatgtttttatggataactccgagaccgcctgcacgagcaatagcaatggccatttgactctctgtaactgtgtccatggcagcggtaataattgggatatttaaagtcaaattatctgccaatttagttgttaaatctgcatcgttaggcaacacatgactttcagctggaataagcaatacatcatcaaaggtaaaaccttttttcaaaaatttagtgtcccaattagacattcgaagtttcctcttttctttctttttgagcttgactctttttatattgtatctatcataccattctataaaaatttgtcaaatgttacaggggtaaataaaaaactatcttttcttcgagatagaaaagatagtttcttgtaaaataaacttagttaaagtaatgaagtcccattgccccttttacctcagatagggtttgacccgcaacttcacgcgctctttcactacctttttgaatcatattataaacttctcccatatccttagcaaattcaatacggcgctcacgaataggacccagttcacgttctaatatttcaagtagataacgcttggtcttcacatcaccaagaccacctcgttgataacgttctttcatatcagcaatttcttgagcatcttctggacgaccaaaaacatctagataatggaaaaccatatttccctcaatcttacctggatcctcaacgcggatatgatctggatctgtatacatactcattacttttttacgcaaagtatccgcatcatcagctaaataaataccattatttagtgatttagacattttagcatttccatctaaaccaggcaaacgccctgctctctcattttctggataaataccttccggctctaccaagacatcacagttatatgcattgttaaaagaacgaacaatttcacgagtttgctcaatcattggtttctgatctgtcccaacaggaacataattagccttgaaagctgtgatatcagctgcttgagcgattggatagaccaagaatcctgtcggaatgctttctccaaatcctttctgagaaatctctgtcttgactgttggatttcgctccaaacgtgctaacgaaactagattcatataatacatagacaactcagccaactctggaatctggctttgaataaaaatagttgacttatttggatccaatccaactgcaagataatccaaagccacatttccgatagactctacaatggtttgaggatctttggcatgatctgtcaaggcttgttggtcagccaagaacacaaacatatcatacttatcctcttcctgtaataatactcgatttttgagacttccaacataatgtccaatatgcaattttcctgttggacggtctcctgttaaaataatgggtttagtcattttgttctccttcgatatagtcctttcaattatagcatttttttaatgaaataaccgtaatttatcaaaataaatcagccttgctttttacagatttgtgtaaaggatactgtaaatataatttacacaaaattgacaaataaaaatttgaatatttctgtattttctagtagaataaatatattacacatataggagaaaaacattgcttacagtatctgatgtttcactacgttttagtgatcgcaaactttttgatgatgtcaatatcaaatttacagaaggaaatacttacggattaatcggtgctaatggtgccggaaaatcaacctttttaaaaattttagctggagatatcgaacctactactggtcacatctctcttggtccagatgaacgtctctctgttcttcgtcaaaatcactttgactacgaagatgaacgtgccattgatgtcgttatcatgggaaatgaaaaactttatagcatcatgaaagagaaagatgctatctacatgaaggaagatttctcagacgaggacggggttcgtgctgccgaactcgaaggagagtttgccgaacttggaggttgggaagcagagagtgaagcctctcaactacttcaaaacctaaacattccagaagaattacactaccaaaacatgagcgaattggccaacggtgaaaaagtaaaggttctcctcgccaaagcactttttggtaaaccagatgttcttctcttggacgagcctactaacggtttggatatccaatcgattacttggttagaagacttcttgattgactttgataacacagttatcgtagtatcccacgaccgtcacttcttaaacaaagtttgtactcacatggccgaccttgactttggaaaaatcaaactctatgtcggaaactacgacttctggaaggaatcttctgagcttgctgctaaattgctagcagaccgtaatgctaaagcagaagaaaaaattaaacaattgcaagaatttgttgctcgtttctctgccaatgcttctaagtcaaggcaggcaacatcacgtaagaaaatgcttgataagattgagctagaagagattgtgccatctagtcgtaaatatccatttatcaactttaaagcggaacgtgagattggtaatgatctcttgacagtagaaaatttaactgtaaagattgatggtgaaactatcttggataatattagtttcatcttgcgtccagatgataagacagcacttattggacaaaatgatattcaaacgactgcattaattcgtgcaatcatgggagatattgactatgaaggaactgtcaagtggggagttacaactagtcaatcttacctaccaaaagataactcagctgattttgcaggaggagaatcaattcttgactggttgcgtcaattcgcaagtaaagaagaagatgacaatactttcctacgtggcttcctcggccgtatgctcttctctggagatgaagttaacaaacctgtaaatgtcttgtcagggggagaaaaagttcgtgtcatgctttcaaaactcatgctcttaaaatcaaatgtccttgtacttgatgatccaacaaatcacttggacttggaatctatctcaagcttgaatgatggattgaaaaactttaaagaatcaatcatctttgccagccatgaccacgaatttattcaaactttggctaaccatatcattgtcttatctaaaaatggcgtcattgaccgtatcgatgaaacctacgatgaattcctagaaaatgcagaagtacaagcaaaagttaaagaactttggaaagactaaataaaacttcaaaactcagttgggttaaccaactgagttttctatcattctacgaggtaacatgaaatcatttttaaaaacatatcgaacctattttatttctttcatcattcctgtagtgattatgtctggagtatatctatctcaaagtatctactggaatagcgacaactctcctctattaggagatggctttcatcaatacgttatttttgatgtagccttacgaaatatcctacatggaaatagtaatctgttttacacctttacaagtggtctagggctaaacttctatgccctatctagttattacttgggtagttttctcgcgcctctggtttacttttttgatctaacgaatatgccagatgctatctatctgacaactctcttaaaatttggattgattggtctgtcaaccttttttagtttgaataaattgtttcaatctatccctcagattttaaaactagccttatctacttcctatgctctgatgagtttcactgtcagtcaattagagataaaaacctggctagatgtttttatcttgattcctttaattataactggtttacatctactgataactgaaaagaaactcctattgtactttacaagtctgtcaatcttatttattcaaaattattattttggatatatgacagtattgtttcttattttctggtatctctgtcaaatttcgtgggactttaagactcgaaaatcatctgttcttgatttcatagttatctcctttttagctggtatggctagtttgattatgactcttcccactctatttgatttacagacacatggggaaaaattgactgaagttacaaagtttcaaactgaaagtagctggtatcttgatctctttgctaagcaattcattggttcctttgacacaacaaagtatggggccatcccaatgatttttgttggactatttccctttattttgaccattttattttttacgctgaaatctattaagtttcacgtgaaactcatatatgtaatattctttgcatttctaattgcaagcttttacatagaagctcttgacttattttggcaaggcatgcatactccaaacatgtttttacatcgctatgcttggattttctctaccttgttaatttacacagcagcagaagtcttaaagcgtctgaaagaacttaaagtctggaattttttagtttcgctttttcttgtagtagcaggatttttagctaccatctatctaaaatcgcattattcttttttaacagatttgaatattctgcttactcttgaatttttggttgtctattctcttttactccttgcagttatcaaaaagtttatatctgtgaatctatttgccattctaatctctttatttatactggttgaaatgagtttaaatgcttcatctcaaatggacggaattgctaaggaatggggatttgcttctcgaagtgcttatagtcgagatatcccagctatggaatctttctcaacatatattggaaatcaatttactcgtactgaaaaactacaaactcagacaggaaatgacagtatgaaattcaactacaatggaatctctcaattttcatctgttcgaaatcgttcatcaagctctactttagataaacttggttttaaatcctctgggactaatctcaatctccgatatgcaaataatagtattttggctgatagtttatttggtatccagtacaatatctcagacagtcctattgataagtatggctttaaagatatctatcaaaaagataatcttaccctatatgaaaatcaatactctcttccgattgcagttgcgagtcaatctgtttacaatgatgtcaagttcaatgaacataccttggataatcaggcctcatttttaaatcaacttgctaacgtcaattttgattatttttctccaataccttatgaaaaaacagaaaaaatagaaaatactaatgatttgattagtgtcacaagttcttcaaatgaagatgcagcaatccagtatcaaattgaagttccagaaaacagccaagtttatctctctttcataaaccttcacttttctaacgataaacaaaagaaggttgacatccttgtaaatggtgaaaaaaagacttttacaactgataatgtcttctccttctttaatctaggatatactaaagagaaaaaaactttcaatatcaatgttagtttccctggaaattcacaagtatcatttgaatctcctaccttctatcgtttagataccaaaactttcaccgaggcaattcaaaaaattaaagaacaacctgtcacagtatcaacttctaaaaacaaggtttttgctacatatgatgtccaacaagatacatctattttcttcaccattccttatgacaaaggttggtctgcctaccaagatggtaagaaaatagaaattaaacaagctcaaactggatttatgaaagttgacattcccaaggggaaaggaactattacactttccttcattcccaatggttttattactggagcaatctgttcctttacttctctcttactatttggaatctataatcacagacgaaagtcatctaaggcataaaaaatcgaccagttaatcggtcgatttttttaatcttcttccattttcttatgttgataggctagcatacctaaactagtaaatagaactagtatgacagctaggaaaatgacttgttgatagagattgtttgtcgtaatcccgaaactgaatagctcattggtaaccagggattaatagatctaaagaaatcatttgtcaaagcaagtggataagtacctgcacttgatgctaactgtagtaaaagcaaaataagtgagaaaaaagctcctatacggctattccacgttgctaaagtggtcaccatagacatgaatactaaacttgttaggatgatgagaataaatattctcatctcatgattagcagttaaaccaataagctgaactcctccatataccaaaattcctgccaaaacagctataataccatttatttcagctcaagatttcaaccaagcccaacggctctctggatgacgtcctgaaggcaatttcgcaaatatcatatttgttgatattgctgcaaaaaaagagcaactgatatcatataaggagctattgcgattccatttacaggaacttgatcattgtctgtttttgaaagattgagtggatttgacaaaatctctgcatttttagattctgttgatactgatttgagttgatcactagcattacctagtccttgtcctaaagaagcaagtcctgtctgtaaatcttccaatccagaagttaactttgttccaccttctgctagtttcccagatccatctgccaatttattagctctattctctaatggagaagcacctgaaagtaactgactggatttgtctgctaattgcccagatcctgattgtaattaaccaactcctgctgtcaatctagaagatttttgtgtcaaggtgtttgagcctgaaactagtttatccaaactacctgtcaaggtggcatttttttcacttagttgacttgcgccctgagaaactttatcaacacctgtagtatatgcgtttacacctgatgcaatcgactgactggcaggaactaatttgctagtaacatctccttgtatctctgttaatccacttgacaatcctatcaaagaagtagaagtaataggtgatacttgattagattgattttttaaagtcgaaagattagaagattgattttgtaagttttctaaacttccctgtaaatcttgtactaaagctacaattgactgagccgattgaatactatcagttgaattttgagatacagaatcacttatctcagtttgttgctcacttgtcaatgattgataagctgctgtcgattgaatattggataatgtagttgttttttcagataaatcacttggtaaagtcactaccatatagtaatcgccatcttccaatcccttctttccttcctcttcatctacaaaatgaaaatccaaggttttattttcttttaaattggacaccatgtcttttcctattgccatagtattaccattataggaagcctctttatcattatttacaactgccacaggtaagtcagacaattgcccatatggatcccacattgatgacaaaaatatgatattgtacagatctggaataagagaaatcccgatcatgacaataataaaggttggttttttttaaattgctttccattctttaaacttagtttctccttttttaaacatattgtctaaaattttgatataatagattatacattaaaaaatctaaattacaagataaaaaatctatttttagacatatagtctaatttgtttacaaggaggaaatatgcaagaaagtaacaaacgcttaaaaacaaagcgaactattgaaaatgctatggtacaattactgatggaacagccatttgataaaatttctactgtcaaattagtagaaaaagccggaattagtcgttccagcttctatactcactataaggataagtatgatatgattgagcactatcaaagcaagctattccatacatttgaatatatttttcaaaaacatgctcatcacaaaagagacgctattttagaagtttttgaatatctagagtcagaaccacttctggctgcccttctttctgaaaatgggactaaagaaatccaaaatttcttacgaaataaacttcatatcatgcttagtacagatttacaaaagcgatttatgcaactgaatctaaataccactgaattagaatatagtagcatctatctaactcatgcactttttggtgtctgccaaacttggattgcacatggaaaaaaagaaagttctcaagaaataacagacttccttatgaaaatgcttggtgatacaaattgatacaaaaagaggaacacagctgtgttcccttttatctatactccgccagtaggactcgaacctacgacatcatgattaacagtcatgcgctactaccaactgagctatggcggataaaatagtccgtacgggattcgaacccgtgttaccgccgtgaaaaggcggtgtcttaaccccttgaccaacggaccttctatctgtagcagatataaccattatatcaatttcttgctaattgtcaatcacttttgagattttttctctaaaatatcttttaattttctaatttttaatcttgaaataggacaacgatggtcttcatagaaaacaatttctaagttttttcgatcaatttctctgatattacctatatttaccaaaaatgacttgtgaggagaataaaatcgctgagtatgtttgtccttttcctgaatatctgtcatggtaccataaaactcttttgcaaaattcttaccaataatgcgcaatttatgagatacccctgttgtttcaatatacaaaatatcatggtaaggaatttttaaatcatttcccttgtaattgtagtcgaaataatctacaacatcttcattttcaagtaacatactcttcgtgtagaagatattttgctcaattctcttcttaaacatctcatcattgatatccttatcaacaaaatctagggctgatacctggtatttataggttagagtcgcaaactctgatcgactagtgataaagacgataatagcgtaaggattgtaatgacgaatgagctgagccacttcaaatccctttttctcaattccatgaatatcgatatctaggaaataaagctgatttacttcatcattttcaatgtattcttcaaattcacggacttttcccgttgtcttgtatgatattggaatattcgattctttcgaaatttcatccaatattctctctagtctcacttgatgttcaataacatcttctaaaattaaaactttcattcaaattccctcttaaatctaatgatttgtctaaatgtactgccttccatctctgtttctaaaataatattgttgtacttatctagtagttctttcacattatttaatccgactccgcgatttcttcccttagtggagaatcctaaggcaaatagatctcctgaaggagtcatcgtcattttacatgaattctgaatcacaataactgtttcagtttccatcttaataactgctacttccatctgctttttatagctatcagccgatccttcgacagcattattcaataaaacgctcatgatacgaaccaaatccaatagttcaattggaagcttggtaatcgtatcttttacttccagtgtaaactctacaccattatttcgagcatagacaattgactgagcaaccaaacttcgtaaagctgagtcttctatgttgttcaaatcaaagtaagtgtacttatctgaacgcaatttatgatttgctttgactaaaacttcattgtaaattctgtcaatttcctgtaaattaccactgtcaattgccatctgcatgctgacaagcattccagcataatcatgtcgaaaaccacggatttcattatacagaccaacaatttcatctgtgtaattctgtaaatgtttctgttcaaatttcttctgcttcaaagcaatctctttctccatttgaactttatgagaattcattgcaaagaaggtcaaaaggagagagataaagacaatagatgacaaaatacttccaaaactattcaaatgtttaatcgtacttaccatatctgaaacgaaagatacaatatgtagcaatagtaaagcaaaaaatacttttttcaagaaaggataaaggtagtccttgtcaaaataggctagttccaaatggaaatagtaaatgatttttaatgtaacaaaataggttaacaccgtcacaacgaaaaagaatgggaaatgatattgtaaaacaaaattatctcctgttatagaggagaaaattacggacagaaagttatgagtgctctcatataaaagagatagtagtaaacttaggaatagtcctctatccctctcatactgtttcatccatcgaaaataggaatataagcccaaaggaaataaaaatctttcaatccctattttatctaaatatagaagataaaaggaaaattcaagtactatttcagttagtaatgtataagcaccaaaaacgtataattcttttctatttattcgacctttacaaattaaacggtaactgtgactaataattaaaaaatgaacaataactgtcccaaatccaagtaaatccattactctttctccttatttcattacttttttcgtaggaaaagaaaatcaaggatgattcttgaaatcctcatctccccacctttaatcttttgtaagtctttttccttcaaagctacaaactgttccaatttaactgtgtttttcataataaaatctcctaaaatgttttttcttgtaagctaacttacaaaaaccattatacaaaatggaatttcgttttagataaaattctctcaactgtcatttttttctcccaaagtgtacttttttaagaaaaaagccgggaaaattcccagctttgctattatattgatcccagcaggattcgaacctgcgaccgttcgcttagaaggcgaatgctctatccagctgagctatgagacctaatacaattattctaccaaaaattcaattaaaagtcaattttctatttatggtaggggaatccctgctgaatcgtaaaagcgcgatagatttgttcaacaagaactagtctcattaactgatggggtaaggttaggcgaccaaaactgacagaaagattggctctattttttacagatgatgataatcctaaacttcccccaataataaaagtaagagtagaaaatccttttatagaagtttcttctaactgcttactaaattcttctgagaagaaagttttcccttcaatggctaacacaataacgaaatcacggtcagcaatttttgataaaattctctgaccttctatttctaaaatcttttgattttctgattcactggccttatctggtgttttttcatctgataactcaatcatttcaaacttagcaaatctagaaattcgttttgaatactctgcgataccatcttttaaatacttttctttcagtttcccaactgttacaactttaattttcatgactctattctaacatattctctattttttcacatcttattcacaaaataaaaaatagatttcaattaagaaaatcacaatttcaaaagagttatccacagtttgtgtaaaacttttgtgtttaagttataattaagctagtcagtttatactttcagtaattcaaacatatggaggcaaatatgaaacatctaaaaacattttacaaaaaatggtttcaattattagtcgttatcgtcattagcttttttagtggagccttgggtagtttttcaataactcaactaactcaaaaaagtagtgtaaacaactctaacaacaatagtactattacacaaactgcctataagaacgaaaattcaacaacacaggctgttaacaaagtaaaagatgctgttgtttctgttattacttattcggcaaacagacaaaatagcgtatttggcaatgatgatactgacacagattctcagcgaatctctagtgaaggatctggagttatttataaaaagaatgataaagaagcttacatcgtcaccaacaatcacgttattaatggcgccagcaaagtagatattcgattgtcagatgggactaaagtacctggagaaattgtcggagctgacactttctctgatattgctgtcgtcaaaatctcttcagaaaaagtgacaacagtagctgagtttggtgattctagtaagttaactgtaggagaaactgctattgccatcggtagcccgttaggttctgaatatgcaaatactgtcactcaaggtatcgtatccagtctcaatagaaatgtatccttaaaatcggaagatggacaagctatttctacaaaagccatccaaactgatactgctattaacccaggtaactctggcggcccactgatcaatattcaagggcaggttatcggaattacctcaagtaaaattgctacaaatggaggaacatctgtagaaggtcttggtttcgcaattcctgcaaatgatgctatcaatattattgaacagttagaaaaaaacggaaaagtgacgcgtccagctttgggaatccagatggttaatttatctaatgtgagtacaagcgacatcagaagactcaatattccaagtaatgttacatctggtgtaattgttcgttcggtacaaagtaatatgcctgccaatggtcaccttgaaaaatacgatgtaattacaaaagtagatgacaaagagattgcttcatcaacagacttacaaagtgctctttacaaccattctatcggagacaccattaagataacctactatcgtaacgggaaagaagaaactacctctatcaaacttaacaagagttcaggtgatttagaatcttaattgacatctatgtaaagaaagctttacataagagaaaagatgtgttagtgtagaatcatggaaaaatttgaaatgatttctatcacagatatacaaaaaaatccctatcaaccccgaaaagaatttgatagagaaaaactagatgaactagcacagtctatcaaagaaaatggggtcattcaaccgattattgttcgtcaatctcctgttattggttatgaaatccttgcaggagagagacgctatcgggcttcacttttagctggtctacggtctatcccagctgttgttaaacagatttcagaccaagagatgatggtccagtccattattgaaaatttacagagagaaaatttaaacccaatagaagaagcacgcgcctatgaatctctcgtagagaaaggattcacccatgctgaaattgcagataagatgggcaagtctcgtccatatatcagcaactccattcgtttactttccttgccagaacagattctttcagaagtagaaaatggcaaactatcacaagcccatgcgcgttccctagttgggttaaataaggaacaacaagactatttctttcaacggattatagaagaagatatttctgtaaggaaattagaagctcttctgacagagaaaaaacaaaagaaacagcaaaaaactaatcatttcatacaaaatgaagaaaaacagttaagaaaactactcggattagatgtagaaattaaactatctaaaaaagacagtggaaaaatcattatttctttttcaaatcaagaagaatatagtagaattatcaacagcctgaaataaggctgttcttttatttttttatctcacaaggttatccactatgtttttcgataaaaagcttaataaatcaataatttcttcttttatccccaacctgtggataaagtttggtaacattgtggattatttttcacagcttgtggaaaattcttgctatctatggtaaaatatctctagtattaaacttttaaatagtaaaggaggagaaaggattgaaagaaaaacaattttggaatcgtatattagaatttgcacaagaaagactgactcgatccatgtatgatttctatgctattcaagctgaactcatcaaggtagaggaaaatgttgccactatatttctacctcgctctgaaatggaaatggtctgggaaaaacaactaaaagatattattgtagtagctggttttgaaatttatgacgctgaaataactccccactatattttcaccaaacctcaagatacgactagctcacaagttgaagaagctacaaatttaactctttataactatagtccaaagttagtatctattccttattcagatacgggattaaaagaaaagtatacctttgataactttattcaaggggatggaaatgtttgggctgtatcagccgctttagctgtctctgaagatttggctctgacctataaccctctttttatctatggaggaccaggccttggtaagactcacttattaaacgctattggaaatgaaattctaaaaaatattcctaatgcgcgtgttaaatatatccctgccgaaagctttattaatgactttcttgatcacctaagacttggggaaatggaaaagtttaaaaagacctatcgtagtcttgatcttttgttaatcgatgatatccagtcactcagcggaaaaaaagtcgcaactcaggaagaatttttcaatacctttaacgcccttcatgacaagcaaaaacagattgtcctaacgagtgatcgtagtccaaaacatctagaagggctcgaggagaggcttgtcacgcgttttagttggggattgacacaaactatcaccccccctgactttgaaacacgtattgccattttacaaagtaagacggaacatttaggctacaatttccaaagtgatactctagaatacctagctgggcaatttgattcaaatgttcgagatcttgagggagccatcaacgacatcactttaattgccagagtaaaaaaaatcaaggatatcactattgatattgctgcagaagccattagagcccgcaaacaagatgttagccaaatgctcgtcatcccaattgataaaatccaaactgaagttggtaacttttatggtgttagtatcaaagaaatgaagggaagtagacgccttcaaaatattgttttggcccgtcaagtagccatgtatttatctagagaactaacagataatagtcttccaaaaattgggaaggaatttgggggaaaagatcataccacagtcattcatgcccatgccaaaataaaatctttgattgatcaagacgataatttacgtttagaaattgaatcaatcaaaaagaaaatcaaataatttgtggataacttttagttttttatcttttttatccacattttttaaacaagctaaaaaacttgatatgacttgtttaaaggctgttttccacagatttcacagactctattattactattatctttctaatactaaaaataaataaaggagaatccatgattcatttttcaattaataaaaatttatttctacaagcattaaatactactaagagagctattagttctaaaaatgccattcctattttatcaacagtaaaaattgacgtgaccaatgaaggtattactttaattggttcaaatggtcaaatttcaattgaaaattttatttctcaaaaaaatgaagatgctggtttgttaattacttctttaggttcgatccttcttgaagcttctttctttatcaatgtagtatctagtttacctgatgtaactcttgattttaaagaaattgaacaaaatcaaattgttttaaccagtggcaaatcagaaattaccctaaaaggaaaagatagcgaacaatatccacgaatccaagaaatttcagcaagcactcctttaatacttgaaacaaaattactcaagaaaattattaatgaaacagcctttgctgcaagtacacaagagagtcgtccgattttaacaggtgtccacttcgtattgagtcaacacaaagagttaaaaacagttgcaacagactctcatcgcctaagccagaaaaaattgactcttgaaaaaaatagtgatgattttgatgtcgtaattcctagccgttctctacgcgaattttcagcggtatttacagatgatatcgaaactgtagagattttctttgccaataaccaaatcctctttagaagcgaaaatattagcttctatactcgtctcctagaaggaaactatcctgatacagatcgcttgattccaacagactttaacactactattacttttaatgtggtaaacttacgccagtcaatggagcgtgcccgtcttttatcaagtgcgactcaaaatggtactgtgaaacttgaaattaaggatggggttgttagcgcccatgttcactctccagaagttggtaaagtaaacgaagaaatcgatactgatcaggttactggtgaagatttgaccattagtttcaacccaacttacttgattgattctcttaaagctttaaatagcgaaaaggtgactattagctttatctcagctgttcgtccatttactcttgtgccagcagatactgacgaagacttcatgcagctcattacaccagttcgtacaaattaagtgaaagaggttgagcctggctcgcctcttttatgatataatcgaaaaagaaaaggagagtagtatgtatcaagttggaaattttgttgagatgaaaaaatcacacgcttgtacaatcaagtcgactggtaaaaaggctaatcgttgggaaattacacgtgtaggagcagatatcaaaataaaatgtagtaattgtgagcatgttgtcatgatggggcgatatgattttgagcgaaaaatgaataaaattattgactgagaacccttagttagagggttagcactttatccctttttgtgttataatattagggattgaaatgaaaacggagaatgagaaatatggctttgacagcaggtatcgttggtttgccaaacgttggtaaatcaacactatttaatgcaattacaaaagcaggagcagaggcagcaaactacccatttgcgacgattgatccaaatgttggaatggtggaagttccagatgaacgcctacaaaaactaactgaaatgataactcctaaaaagacagttcccacaacatttgaatttacagatattgcagggattgtaaaaggagcttcaaaaggagaggggctagggaataaattcttggccaatattcgtgaagtagatgcgattgttcacgtagttcgtgcttttgatgatgaaaatgtaatgcgcgagcaaggacgtgaagacgcctttgtagatccacttgcagatattgataccattaatctggaattgattcttgctgacttagaatcagtgaacaaacgatatgcgcgtgtagaaaagatggcacgtacgcaaaaagataaagaatcagtagcagaattcaatgttcttcaaaagattaaaccagtcctagaagacgggaaatcagctcgtaccattgaatttacagatgaggaacaaaaggttgtcaaaggtcttttccttttgacgactaaaccagttctttatgtagctaatgtggacgaggatgtggtttcagaacctgactctatcgactatgtcaaacaaattcgtgaatttgcagcgacagaaaatgctgaagtagtcgttatttctgcgcgtgctgaggaagaaatttctgaattgaatgatgaagataaaaaagagtttcttgaagccattggtttgacagaatcaggtgtagataagttgacgcgtgcagcttaccacttgcttggattgggaacttacttcacagctggtgaaaaagaagttcgcgcttggactttcaaacgtggtatgaaggctcctcaagcagctggtattatccactcagactttgaaaaaggctttattcgtgcagtaaccatgtcatatgaagatctagtgaaatacggatctgaaaaggccgtaaaagaagctggacgcttgcgtgaagaaggaaaagaatatatcgttcaagatggcgatatcatggaattccgctttaatgtctaaaaattaataaatggtgtcaattaggttggaaaaaaattccaacccttttggcttttgaaaggaaaaataaatgaccaaattacttgtaggcttgggaaatccaggggataaatattttgaaacaaaacacaatgttggttttatgttgattgatcaactagcgaagaaacagaatgtcacttttacacacgataagatatttcaagctgacctagcatcctttttcctaaatggagaaaaaatttatctggttaaaccaacgacctttatgaatgaaagtggaaaagcagttcatgctttattaacttactatggtttggatattgacgatttacttatcatttacgatgatcttgacatggaagttgggaaaattcgtttaagagcaaaaggctcagcaggtggtcataatggtatcaagtctattattcaacatataggaactcaggtctttaaccgtgttaagattggaattggaagacctaaaaatggtatgtcagttgttcatcatgttttgagtaagtttgacagggatgattatatcggtattttacagtctgttgacaaagttgacgattctgtaaactactatttacaagagaaaaattttgagaaaacaatgcagaggtataacggataaatggtgaccttattagatttattctcagaaaatgatcagattaaaaaatggcatcaaaatttaacagataagaaaagacaactaatacttggtttatcaacatctactaaggctcttgcaattgcaagcagtttagaaaaagaagataggattgtgttattgacgtcaacttatggagaagcagaaggacttgttagtgatcttatttctatcttgggtgaggaactcgtctatccatttttggtagatgatgctcctatggtggagtttttgatgtcttcacaggaaaaaattatttcacgggttgaagccttgcgttttttgactgattcatctaagaaagggattttagtttgtaatatcgcagcaagtcgattgattttaccgtctcccaatgcattcaaagatagtattgtaaaaatctcagttggtgaagaatatgatcaacacgcgtttatccatcagttaaaggaaaatggctatcgaaaagttactcaagtacaaactcagggcgaatttagtcttcgaggagatattttagatatttttgaaatatcccagttagaaccttgtcgaattgagttttttggtgatgaaattgatggtatcaggtcatttgaagtagaaacacaattatcgaaagaaaataagacagaactcactatctttccagctagtgatatgcttttgagagaaaaggattatcaacgaggacagtcagctttagaaaaacaaatttcaaaaactttatcacctattttgaaatcatacctagaagaaattctttcaagttttcaccaaaaacaaagtcatgcagactctcggaagtttttatctttgtgctatgataagacatggactgtctttgattatattgaaaaagatactccaatattctttgatgattatcaaaaattgatgaatcagtatgaagtctttgaaagagacttagcgcagtactttacagaagaattacagaatagtaaagcattttctgatatgcagtatttttctgatattgaacaaatctataaaaaacaaagtccagtgacctttttctctaatcttcaaaagggtttaggaaatctcaaatttgacaaaatttatcaattcaatcaatatcctatgcaggaatttttcaatcagttttcttttctaaaagaagaaattgaacgatataaaaaaatggattacaccattattctgcagtctagcaattcaatgggaagtaaaacattggaggatatgttagaggaatatcagattaaattggattctagagataagacaaatatctgtaaagaatctgtaaacttaatagagggtaatctcagacatggttttcattttgtagatgaaaagattttattgataactgaacatgagatttttcaaaagaaattaaagcgtcgttttcgaagacaacatgtttcaaatgcagagagattaaaagattacaatgaacttgaaaaaggggactatgttgtccatcatatccatgggattggtcaatatctaggaattgaaaccattgaaatcaagggaattcatcgcgattatgtcagtgtccaataccaaaatggtgatcaaatttctatccccgtggaacagattcatctactgtccaaatatatttcaagtgatggtaaagctccaaaactcaataaattaaatgacggtcattttaaaaaggccaagcaaaaggttaagaaccaggtagaggatatagctgatgatttaatcaaactctactctgaacgtagtcagttgaagggttttgctttctcagctgatgatgatgatcaagatgcctttgatgatgctttcccttatgttgaaacggatgatcaacttcgtagtattgaggaaatcaagagggatatgcaggcttctcagccaatggatcgacttttagttggggatgttggttttggaaagactgaagttgctatgcgtgcagcctttaaagcagtcaatgatcacaaacaggttgtcattctagttccgacgacggttttagcgcaacagcactatacgaattttaaggaacgattccaaaattttgcagttaatattgatgtgttgagtcgctttagaagtaaaaaagagcagactgcaacacttgaaaaattgaaaaacggtcaagtcgatattttgattggaacacatcgtgttttgtcaaaagatgttgtgtttgctgatttgggcttgatgattattgatgaggaacagcgatttggtgtcaagcataaggaaactttgaaagaactgaagaaacaagtggatgtcctaaccttgaccgctacgccaatccctcgtaccctccatatgtctatgctgggaatcagagatttatctgttattgaaactccgccgactaatcgctatcctgttcagacctatgttttggaaaagaatgatagtgtcattcgtgatgctgtcttgcgtgaaatggagcgtggaggtcaagtttattatctttacaacaaagttgacacaattgttcagaaggtttcagaattacaggagttgattccggaggcttcgattggatatgttcatggtcgaatgagtgaagtccagttggaaaatactctattagactttattgagggacaatacgatatcttggtgacgactactattattgagacaggggtggacattccaaatgctaatactttatttattgaaaatgcggaccatatgggcttgtcaaccttatatcagttaagaggaagagtcggtcgtagtaatcgtattgcttatgcttatctcatgtatcgtccagaaaaatcaatcagtgaagtctctgaaaagagattagaagcgattaaaggatttacagaattgggctctggctttaagattgcaatgcgagatctttcgattcgtggagcaggaaatcttttaggaaaatcccagtctggtttcattgattctgttggttttgaattgtattcgcagttattagaggaagctattgctaaacgaaacggtaatgctaacgctaacacaagaaccaaagggaatgctgagttgattttgcaaattgatgcctatcttcctgatacttatatttctgatcaacgacataagattgaaatttacaagaaaattcgtcaaattgacaaccgtgtcaattatgaagagttacaagaggagttgatagaccgttttggagaatacccagatgtagtagcctatctgttagagattggtttggtcaaatcatacttggacaaggtctttgttcaacgtgtggaaagaaaagataataaaattacaattcaatttgaaaaagtcactcaacgactgtttttagctcaagattattttaaagctttatccgtaacgaacttaaaagcaggcatcgctgagaataagggattaatggagcttgtatttgatgtccaaaataagaaagattatgaaattttagaaggtttgctgatttttggagaaagtttattagagataaaagagtctaaggaagaaaattccatttgatatttttcttctataaaatagataaaaatggtacaataataaattgaggtaataaggatgagattagataaatatttaaaagtatcgcgaattatcaagcgtcgtacagtcgcaaaggaagtagcagataaaggtagaatcaaggttaatggaatcttggccaaaagttcaacggacttgaaagttaatgaccaagttgaaattcgctttggcaataagttgctgcttgtaaaagtactagagatgaaagatagtacaaaaaaagaagatgcagcaggaatgtatgaaattatcagtgaaacacgggtagaagaaaatgtctaaaaatattgtacaattgaataattcttttattcaaaatgaataccaacgtcgtcgctacctgatgaaagaacgacaaaaacggaatcgttttatgggaggggtattgattttgattatgctattatttatcttgccaacttttaatttagcgcagagttatcagcaattactccaaagacgtcagcaattagcagacttgcaaactcagtatcaaactttgagtgatgaaaaggataaggagacagcatttgctaccaagttgaaagatgaagattatgctgctaaatatacacgagcgaagtactattattctaagtcgagggaaaaagtttatacgattcctgacttgcttcaaaggtgataaaatggaaaatttattagacgtaatagagcaatttttgagtttgtcagatgaaaagctggaagaattggctgataaaaatcaattattgcgtttacaagaagaaaaggaaaggaagaatgcgtaaattcttaattattttgttgctaccaagttttttgaccatttcaaaagtcgttagcacagaaaaagaagtcgtctatacttcgaaagaaatttattacctttcacaatctgactttggtatttattttagagaaaaattaagttctcccatggtttatggagaggttcctgtttatgcgaatgaagatttagtagtggaatctgggaaattgactcccaaaacaagttttcaaataaccgagtggcgcttaaataaacaaggaattccagtatttaagctatcaaatcatcaatttatagctgcggacaaacgatttttatatgatcaatcagaggtaactccaacaataaaaaaagtatggttagaatctgactttaaactgtacaatagtccttatgatttaaaagaagtgaaatcatccttatcagcttattcgcaagtatcaatcgacaagaccatgtttgtagaaggaagagaatttctacatattgatcaggctggatgggtagctaaagaatcaacttctgaagaagataatcggatgagtaaagttcaagaaatgttatctgaaaaatatcagaaagattctttctctatttatgttaagcaactgactactggaaaagaagctggtatcaatcaagatgaaaagatgtatgcagccagcgttttgaaactctcttatctctattatacgcaagaaaaaataaatgagggtctttatcagttagatacgactgtaaaatacgtatctgcagtcaatgattttccaggttcttataaaccagagggaagtggtagtcttcctaaaaaagaagataataaagaatattctttaaaggatttaattacgaaagtatcaaaagaatctgataatgtagctcataatctattgggatattacatttcaaaccaatctgatgccacattcaaatccaagatgtctgccattatgggagatgattgggatccaaaagaaaaattgatttcttctaagatggccgggaagtttatggaagctatttataatcaaaatggatttgtgctagagtctttgactaaaacagattttgatagtcagcgaattgccaaaggtgtttctgttaaagtagctcataaaattggagatgcggatgaatttaagcatgatacgggtgttgtctatgcagattctccatttattctttctattttcactaagaattctgattatgatacgatttctaagatagccaaggatgtttatgaggttctaaaatgagggaaccagattttttaaatcattttctcaagaagggatatttcaaaaagcatgctaaggcggttctagctctttctggtggattagattccatgtttctatttaaggtattgtctacttatcaaaaagagttagagattgaattgattctagctcatgtgaatcataagcagagaattgaatcagattgggaagaaaaggaattaaggaagttggctgctgaagcagagcttcctatttatatcagcaatttttcaggagaattttcagaagcgcgtgcacgaaattttcgttatgatttttttcaagaggtcatgaaaaagacaggtgcgacagctttagtcactgcccaccatgctgatgatcaggtggaaacgatttttatgcgcttgattcgaggaactcgcttgcgctatctatcaggaattaaggagaagcaagtagtcggagagatagaaatcattcgtcccttcttgcattttcagaaaaaagactttccatcaatttttcactttgaagatacatcaaatcaggagaatcattattttcgaaatcgtattcgaaattcttacttaccagaattggaaaaagaaaatcctcgatttagggatgcaatcttaggcattggcaatgaaattttagattatgatttggcaatagctgaattatctaacaatattaatgtggaagatttacagcagttattttcttactctgagtctacacaaagagttttacttcaaacttatctgaatcgttttccagatttgaatcttacaaaagctcagtttgctgaagttcagcagattttaaaatctaaaagccagtatcgtcatccgattaaaaatggctatgaattgataaaagagtaccaacagtttcagatttgtaaaatcagtccgcaggctgatgaaaaggaagatgaacttgtgttacactatcaaaatcaggtagcttatcaaggatatttattttcttttggacttccattagaaggtgaattaattcaacaaatacctgtttcacgtgaaacatccatacacattcgtcatcgaaaaacaggagatgttttgattaaaaatgggcatagaaaaaaactcagacgtttatttattgatttgaaaatccctatggaaaagagaaactctgctcttattattgagcaatttggtgaaattgtctcaattttgggaattgcgaccaataatttgagtaaaaaaacgaaaaatgatataatgaacactgtactttatatagaaaaaatagataggtaaaaaatgttagaaaacgatattaaaaaagtcctcgtttcacacgatgaaattacagaagcagctaaaaaactaggtgctcaattaactaaagactatgcaggaaaaaatccaatcttagttgggattttaaaaggatctattccttttatggctgaattggtcaaacatattgatacacatattgaaatggacttcatgatggtttctagctaccatggtggaacagcaagtagtggtgttatcaatattaaacaagatgtgactcaagatatcaaaggaagacatgttctatttgtagaagatatcattgatacaggtcaaactttgaagaatttgcgagatatgtttaaagaaagagaagcagcttctgttaaaattgcaaccttgttggataaaccagaaggacgtgttgtagaaattgaggcagactatacttgctttactatcccaaatgagtttgtagtaggttatggtttagactacaaagaaaattatcgtaatcttccttatattggagtattgaaagaggaagtgtattcaaattagaaagaataatctttaatgaaaaaacaaaataatggtttaattaaaaatccttttctatggttattatttatctttttccttgtgacaggattccagtatttctattctgggaataactcaggaggaagtcagcaaatcaactatactgagttggtacaagaaattaccgatggtaatgtaaaagaattaacttaccaaccaaatggtagtgttatcgaagtttctggtgtctataaaaatcctaaaacaagtaaagaagaaacaggtattcagtttttcacgccatctgttactaaggtagagaaatttaccagcactattcttcctgcagatactaccgtatcagaattgcaaaaacttgctactgaccataaagcagaagtaactgttaagcatgaaagttcaagtggtatatggattaatctactcgtatccattgtgccatttggaattctattcttcttcctattctctatgatgggaaatatgggaggaggcaatggccgtaatccaatgagttttggacgtagtaaggctaaagcagcaaataaagaagatattaaagtaagattttcagatgttgctggagctgaggaagaaaaacaagaactagttgaagttgttgagttcttaaaagatccaaaacgattcacaaaacttggagcccgtattccagcaggtgttcttttggagggacctccggggacaggtaaaactttgcttgctaaggcagtcgctggagaagcaggtgttccattctttagtatctcaggttctgactttgtagaaatgtttgtcggagttggagctagtcgtgttcgctctctttttgaggatgccaaaaaagcagcaccagctatcatctttatcgatgaaattgatgctgttggacgtcaacgtggagtcggtctcggcggaggtaatgacgaacgtgaacaaaccttgaaccaacttttgattgagatggatggttttgagggaaatgaagggattatcgtcatcgctgcgacaaaccgttcagatgtacttgaccctgcccttttgcgtccaggacgttttgatagaaaagtattggttggtcgtcctgatgttaaaggtcgtgaagcaatcttgaaagttcacgctaagaataagcctttagcagaagatgttgatttgaaattagtggctcaacaaactccaggctttgttggtgctgatttagagaatgtcttgaatgaagcagctttagttgctgctcgtcgcaataaatcgataattgatgcttcagatattgatgaagcagaagatagagttattgctggaccttctaagaaagataagacagtttcacaaaaagaacgagaattggttgcttaccatgaggcaggacataccattgttggtctagtcttgtcgaatgctcgcgttgtccataaggttacaattgtaccacgcggccgtgcaggcggatacatgattgcacttcctaaagaggatcaaatgcttctatctaaagaagatatgaaagagcaattggctggcttaatgggtggacgtgtagctgaagaaattatctttaatgtccaaaccacaggagcttcaaacgactttgaacaagcgacacaaatggcacgtgcaatggttacagagtacggtatgagtgaaaaacttggcccagtacaatatgaaggaaaccatgctatgcttggtgcacagagtcctcaaaaatcaatttcagaacaaacagcttatgaaattgatgaagaggttcgttcattattaaatgaggcacgaaataaagctgctgaaattattcagtcaaatcgtgaaactcacaagttaattgcagaagcattattgaaatacgaaacattggatagtacacaaattaaagctctttacgaaacaggaaagatgcctgaagcagtagaagaggaatctcatgcactatcctatgatgaagtaaagtcaaaaatgaatgacgaaaaataaccctgagagaggctggagcctctcttttttgtgcagtttaggagctaaagggaacagaatggagaaaatggaacaaatgtgttttctaatctgttagactgtatctagaaaggggaaaattatgattaaagaattgtatgaagaagtccaagggactgtgtataagtgtagaaatgaatattaccttcatttatgggaattgtcggattgggagcaagaaggcatgctctgcttacatgaattgattagtagagaagaaggactggtagacgatattccacgtttaaggaaatatttcaagaccaagtttcgaaatcgaattttagactatatccgtaaacaggaaagtcagaagcgtagatacgataaagaaccctatgaagaagtgggtgagatcagtcatcgtataagtgaggggggtctctggctagatgattattatctctttcatgaaacactaagagattatagaaacaaacaaagtaaagagaaacaagaagaactagaacgcgtcttaagcaatgaacgatttcgagggcgtcaaagagtattaagagacttacgcattgtgtttaaggagtttactatccgtacccactagtaagtcatgcaaaaaaaatgaaaaaaattagaaaaagtagttgacaaagtttgaaaaggctgtataatagtaagagttgaaaataacaactcaggtccgttggtcaaggggttaagacaccgccttttcacggcggtaacacgggttcgaatcccgtacggactatggtatgttgcgtcaggaccacttgatgaaaaaaagtttaaaaaaacttaaaaatcttcaaaaaagtgttgacaagcgaaagcagttgtgatatactaatatagttgtcgcttgagagaagcaagtgacaaagacctttgaaaactgaacaagacgaaccaatgtgcagggcgctacaacgtaagttgtagtactgaacaatgaaaaaaacaataaatctgtcagtgacagaaatgagtaagaactcaaactttttaatgagagtttgatcctggctcaggacgaacgctggcggcgtgcctaatacatgcaagtagaacgctgaaggaggagcttgcttctctggatgagttgcgaacgggtgagtaacgcgtaggtaacctgcctggtagcgggggataactattggaaacgatagctaataccgcataagagtagatgttgcatgacatttgcttaaaaggtgcacttgcatcactaccagatggacctgcgttgtattagctagttggtggggtaacggctcaccaaggcgacgatacatagccgacctgagagggtgatcggccacactgggactgagacacggcccagactcctacgggaggcagcagtagggaatcttcggcaatggacggaagtctgaccgagcaacgccgcgtgagtgaagaaggttttcggatcgtaaagctctgttgtaagagaagaacgagtgtgagagtggaaagttcacactgtgacggtatcttaccagaaagggacggctaactacgtgccagcagccgcggtaatacgtaggtcccgagcgttgtccggatttattgggcgtaaagcgagcgcaggcggttagataagtctgaagttaaaggctgtggcttaaccatagtaggctttggaaactgtttaacttgagtgcaagaggggagagtggaattccatgtgtagcggtgaaatgcgtagatatatggaggaacaccggtggcgaaagcggctctctggcttgtaactgacgctgaggctcgaaagcgtggggagcaaacaggattagataccctggtagtccacgctgtaaacgatgagtgctaggtgttagaccctttccggggtttagtgccgtagctaacgcattaagcactccgcctggggagtacgaccgcaaggttgaaactcaaaggaattgacgggggcccgcacaagcggtggagcatgtggtttaattcgaagcaacgcgaagaaccttaccaggtcttgacatccctctgaccgctctagagatagagctttccttcgggacagaggtgacaggtggtgcatggttgtcgtcagctcgtgtcgtgagatgttgggttaagtcccgcaacgagcgcaacccctattgttagttgccatcatttagttgggcactctagcgagactgccggtaataaaccggaggaaggtggggatgacgtcaaatcatcatgccccttatgacctgggctacacacgtgctacaatggctggtacaacgagtcgcaagccggtgacggcaagctaatctcttaaagccagtctcagttcggattgtaggctgcaactcgcctacatgaagtcggaatcgctagtaatcgcggatcagcacgccgcggtgaatacgttcccgggccttgtacacaccgcccgtcacaccacgagagtttgtaacacccgaagtcggtgaggtaaccgtaaggagccagccgcctaaggtgggatagatgattggggtgaagtcgtaacaaggtagccgtatcggaaggtgcggctggatcacctcctttctaaggataaggaactgcgcattggtcttgtttagtcttgagaggtcttgtggggccttagctcagctgggagagcgcctgctttgcacgcaggaggtcagcggttcgatcccgctaggctccattggtgagagatcaccaagtaatgcacattgaaaattgaatatctatatcaaatagtaacaagaaaataaaccgaaaacgctgtagtattaataagagtttatgactgaaaggtcagaaaataaggttaagttaataagggcgcacggtggatgccttggcactaggagccgacgaaggacgtgacaaacgacgatatgccttgggtagctgtaagtaagcgatgatccagggatttccgaatgggggaacccaacaggtaatacctgttacccacatctgttaaggatgtgaggaggaagacgcagtgaactgaaacatctaagtagctgcaggaagagaaagcaaaagcgattgccttagtagcggcgagcgaaacggcagaagggcaaaccgaagagtttactcttcggggttgtaggactgcaatgtggactcaaagattatagaagaatgatttgggaagatcagccaaagagagtaatagcctcgtatttaaaatagtctttgtacttagcagtatcctgagtacggcgggacacgtgaaatcccgtcggaatctgggaggaccatctcccaaccctaaatactccctagtgaccgatagtgaaccagtaccgtgagggaaaggtgaaaagcaccccgggaggggagtgaaatagaacctgaaaccgtgtgcctacaacaagttcgagcccgttaatgggtgagagcgtgccttttgtagaatgaaccggcgagttacgttatgatgcgaggttaagttgaagagacggagccgtagggaaaccgagtctgaatagggcgccttagtatcatgacgtagacccgaaaccatgtgacctacccatgagcaggttgaaggtgcggtaagacgcactggaggaccgaaccagggcacgttgaaaagtgcttggatgacttgtgggtagcggagaaattccaaacgaacttggagatagctggttctctccgaaatagctttagggctagcgtcgacattagagattcttggaggtagagcactgtttgggtgaggggtccatcccggattaccaatctcagataaactccgaatgccaatgaattatggtcggcagtcagactgcgagtgctaagatccgtagtcgaaagggaaacagcccagaccaccagctaaggtcccaaaataattgttaagtggaaaaggatgtggggttgcacagacaactaggatgttagcttagaagcagctattcattcaaagagtgcgtaatagctcactagtcgagtgaccctgcgccgaaaatgtaccggggctaaaacaatttaccgaagctgtggatacctttataggtatggtaggagagcgttctatgtgtgatgaaggtataccgtgaggagtgctggaacgcatagaagtgagaatgccggtatgagtagcgaaagacaggtgagaatcctgtccaccgtaagactaaggtttccaggggaaggctcgtccgccctgggttagtcgggacctaaggagagaccgaaaggtgtatccgatggacaacaggttgatattcctgtactagagtatgtagtgatggagggacgcagtaggctaactaaagcagacgattggaagagtctgtctaagcagtgaggtgtgaattgagtcaaatgcttaattctataacattgagctgtgatggggagcgaagtttagtagcgaagttagtgacgtcacactgccaagaaaagcttctagcgtttaaacatactctacccgtaccgcaaaccgacacaggtagtcgaggcgagtagcctcaggtgagcgagagaactctcgttaaggaactcggcaaaatgaccccgtaacttcgggagaaggggtgctgacttaaagtcagccgcagtgaataggcccaagcaactgtttatcaaaaacacagctctctgctaaatcgtaagatgatgtatagggggtgacgcctgcccggtgctggaaggttaagaggagtgcttagcgtaagcgaaggtatgaattgaagccccagtaaacggcggccgtaactataacggtcctaaggtagcgaaattccttgtcgggtaagttccgacccgcacgaaaggcgtaatgatttgggcactgtctcaacgagagactcggtgaaattttagtacctgtgaagatgcaggttacccgcgacaggacggaaagaccccatggagctttactgcagtttgatattgagtgtctgtaccacatgtacaggataggtaggagtctaagagatcgggacgccagtttcgaaggagacgctgttgggatactacccttgtgttatggccactctaacccagataggtgatccctatcggagacagtgtctgacgggcagtttgactggggcggtcgcctcctaaaaggtaacggaggcgcccaaaggttccctcagaatggttggaaatcattcgcagagtgtaaaggtataagggagcttgactgcgagagctacaactcgagcagggacgaaagtcgggcttagtgatccggtggttccgtatggaagggccatcgctcaacggataaaagctaccctggggataacaggcttatctcccccaagagttcacatcgacggggaggtttggcacctcgatgtcggctcgtcgcatcctggggctgtagtcggtcccaagggttgggctgttcgcccattaaagcggcacgcgagctgggttcagaacgtcgtgagacagttcggtccctatccgtcgcgggcgtaggaaatttgagaggatctgctcctagtacgagaggaccagagtggacttaccgctggtgtaccagttgtcttgccaaaggcatcgctgggtagctatgtagggaagggataaacgctgaaagcatctaagtgtgaaacccacctcaagatgagatttcccatgattatatatcagtaagagccctgagagatgatcaggtagataggttagaagtggaagtgtggcgacacatgtagcggactaatactaatagctcgaggacttatccaaagtaactgagaatatgaaagcgaacggttttcttaaattgaatagatattcaattttgagtaggtattactcagagttaagtgacgatagcctaggagatacacctgtacccatgccgaacacagaagttaagccctagaacgccggaagtagttgggggttgccccctgtgagatagggaagtcgcttagctttaatccgccatagctcagttggtagtagcgcatgactgttaatcatgatgtcgtaggttcgagtcctactggcggagtaattgagttaagaggtttagacctcttttttgttatgtaataataatctattttgtgttatagtgaaatgaaccaaaaatagtacacaatgtggtataatcttcttatggcatattcaatagattttcgtaaaaaagttctctcttattgtgagcgaataggtagtataacagaagcatcacacgttttccaaatctcacgtaataccatttatggctggttaaagctaaaagagaaaacaggagagctaaaccaccaagtaaaaggaacaaaaccaagaaaagttgatagagatagacttaaaaactatcttactgacaatccagacgcttatttgactgaaatagcttctgaatttggctgtcatccaactaccatccactatacgctcaaagctatgggctacactcgaaaaaagaaccacacctactatgaacaagacccagaaaaagtagccttatttcttaagaattttaatagtttaaagcacctagcacctgtttagattgacgaaacaggattcgatacttatttttatcgagaatatggtcgctcattaaaaggtcaattaataagaggcaaagtatctggaagaagatatcagaggatttctttggttgcaggtctaacaaatggtgaattaatcgctccaatgacttacgaagagacgatgacgagcgacttttttgaagcttggtttcagaattttctcttaccaacattaaacacaccatcggttattattatggataatgtaagattccatagaatggggaagctagaacttttatgcgaagagtttgggcataaacttttacctcttcctccctactcgcctgagtacaatcctattgagaaaacatgggctcatatcaaaaagcacctcaaaaaggtattaccaagttgcaataccttttacgaggcttttttatcctgctcttgtttcaattgactatattagaggcgagacatttttcggttctttgtcaactgtagtgggttgaagaaagcgaagatctagaaaggacaaatttcgtcctttcttttttgaagttttcaaagttcctaaaaccaaaggcattgtgcttgataagtttgatgagattattggtggcttccagtttggcgttggaataaggtaattgaagggcgttgacgattttctctttatctttgaggaaggttttaaacaaagtctgaaacagaggtggaaaagcaagagctgatagagattatagtggtgtttaaagtcttcggaatagctcaaaagtttatctagaatttctttattagtcaagtgcatacgaaaagtagggcgataaaatcgtttatcactcagtttctgactatcttgttgaatgagcttccagtagcgcttgatagccttgtattcatgggatttcggatgatggcttgtgttctgctctcaagaacagttatgatattgagtttatcaaagtcctgagcaataaagctcatctccatctcccgattgaaacagtcactccccggactgtttcaacgtcctaggacataatctcaggaagacgcgaaaaatcatgctcaaagtgaaaatcattgttcttgcgaatgacagttgaagttgaaatagacaactgatgatcaatgtcggtcatagaagtctttttaattagcttctgagcaatcttttggttgatgatacaaggaatttgatgattcttcttgacgatagaagtctcagcgagctccatttttgagcaatgatagcacttaaaacggccttttctaagaagaattctagtttgaatttttttatactagaaaatcagaaccataatacctatataaaaatattatagttctaataggatttacccaaaagttttaaggcggtctttttagaactttaattgtttgaaatttaggtagcaaatttgtttctattttgtcaacttttcctatttttatcttgttgaggctggtattttaacaattcaggaattgatagtgaatgtgtaaaattttttgttagaataagtttataaaaaagaaaaggagtatttgattatgttacaaaaaatttatgagcagatggctaatttctatgatagtattgaagaagagtatggtcctacatttggtgataattttgactgggaacatgttcattttaaatttttaatttattatttagtgagatatggcattggttgtcgtaaggattttattgtttaccattatcgtgttgcttatcgtttgtatcttgaaaaattggtaatgaatcggggttttatttcttgttgaggtaattttagtaaatttccgaactaatttactcttttatggaaagatgatagtaaatagctagtaatttttctaaatcattttttaatagttggaaatagcaaatctttctattgtttcttcttgataaaaaggcgattttttattataataaattgtaagatataattgcaggtgagagtcctgccatgtatgtgagaaaggaagagcctgatggctcagacaagattatgacttcagttgttgttgtaggtacccaatggggtgatgaaggtaaagggaagattacagacttcctttcagcgaatgcagaagtgattgcacgttaccaaggtggtgataatgctggtcacacgattgtgattgacggtaagaaatttaagttgcacttgattccatctgggattttcttccctgaaaaaatatctgtcattgggaatggtatggttgtaaatcctaaatctcttgtaaaagagttgagctatcttcatgaggaaggtgtaacaactgataacttgcgtatttctgatcgtgcgcatgttattttgccttatcatatcgagttggatcgcttgcaagaagaagctaagggcgacaataagattggtacgacaattaagggaattggtccagcttatatggacaaggctgctcgtgttggaattcgtattgcagatcttttagataaagatattttccgtgagcgtttagaacgtaaccttgctgaaaagaatcgtctttttgaaaaattgtatgacagtaaagcgattgttttcgatgatatttttgaagaatattacgaatatggtcaacaaatcaagaaatacgtgatagatacatctgttatcttgaatgatgcgcttgataatggcaaacgtgtgctttttgaaggtgcacaaggtgttatgctagatatcgaccaaggtacttatccatttgttacgtcatcaaaccctgtagctggtggtgtgacaattggttctggtgtcggtccaagcaagattgacaaggttgtaggtgtatgtaaagcttatacgagtcgtgtaggagatggtcctttcccaactgagttgtttgatgaagtgggagaacgtatccgtgaagtgggtcatgaatatggtacaacaactggtcgtccacgtcgtgtaggttggtttgactcagttgtgatgcgtcatagccgtcgtgtttctggtattactaacctttctttgaactctattgatgttttgagcggtttggatactgtgaaaatctgtgtggcctatgatcttgacggtcaacgtattgactactatccagctagtcttgaacaattgaaacgttgcaagcctatctatgaagagttgccaggttggtcagaagatattaccggagttcgcaatttggaagatcttcctgagaatgcgcgtaactatgttcgtcgtgtgagtgaattggttggcgttcgtatttctactttctcagtaggtcctggtcgtgaacaaacaaatattttagaaagtgtttggtcctaagagatttttaagatttgtttaagataggtcgggtatactatagacggttacaagaagacctcctaacttgttgtaacaaatatcctaaacttttctttttcataataatctccctatagagtcaccgcattcggtggctttttttgtgttgggattcatgatataataataaaatcgataagtaggaaaagagaaaagagatgtattatacgcttgaagaaaaagaagtctttatgagggaggctttgagagaggctgagattgctcttgaacacgatgaaattccaattggttgtgtgattgtcaaagatggggaaatcattggtcgtgggcataatgcgcgtgaggaattacagcgagcggttatgcatgcggaaattatggctatagaggatgcgaacttgagtgaggagagctggcgcttgctggattgcacactttttgtgaccattgaaccttgtgtcatgtgtagtggagcgattgggcttgcccgcattccaaatgtggtctatggggctaaaaaccagaaatttggcgctgctgggagtttgtacaatatcttgacagatgagcgtctcaatcatcgtgtggaggttgaaataggaattttggaagatgaatgcgcagctatcatgcaggatttttttagaaatagacggaaaaaataattttgcttttaaaatgaataggaatgtgatataataaatagtggagcaacagttctgcgtgaagcgggtcaggggaggaatccagcagccctaagcgatttgaattgtgtgctctttttttcgtgctttttccgaataaataagatagaataatctagaataaatgataatagaaaagagaaaattatgaaaattcgtggttttgaattggtttcgagttttacagatgaaaatttattgcccaagcgtgagacagcgcatgcggctggttacgacttaaaggttgctgtgcgtacagttgttgcgccaggagagattgtcttggttccgacaggggttaaggcttatatgcagccgactgaggttctctacctctatgatcgttcttcaaatcctcgtaagaagggcttggttttaattaactcagttggagtcattgatggggattattatggaaatcctggaaatgaagggcatatttttgcgcagatgaagaatatcacagaccaagaggttgttcttgaagttggggagcgtattgtccaggctgtttttgctactttcttaattgcagatggagatgcagctgatggcgttcgaactggtggatttggatcgacagggcactagaatgaagattatctttgtacgtcatggggagccagattaccgtgagttagaggagcgttcttatataggatttgggatagatttggcacccttgtctgagatgggacggcagcaagtccagaaattgagcaaaaatcctttactctcgtcagctgaaataatcgtatcttctgcagtcacaagagctttagaaacggcttcgtatgtggtctgtgctacgggtcttcctttaagagtagagcctttattacatgaatggcaggtctataaaacaggaatagaaaactttgaaacagctagaagactgtttttagaaaacaagggggagttgcttcctaatagtcctattcaatatgagacagctacggaaatgaagtctcggtttctagaatgtatgtctaagtatcgagaacatcagactgtggtagttgttgctcatcgaatgctcatgcgccagtttgtgccaaatgagaagattgatttttgccaagtgattgagtgtgagttagagatatagaaagaggtttgtcatcgcaaagaaaaaagcgacatttgtatgtcaaaattgtgggtataattcccctaaatatctgggacgttgccccaactgtgggtcttggtcttcttttgtggaagaggttgaggttgccgaagttaagaatgcgcgtgtgtccttgacaggtgagaaaaccaagcccatgaaactagctgaggtgacttccatcaatgtcaatcgaaccaagacggagatggaggaattcaaccgtgtgcttggaggcggagtggtaccaggaagtctcgtccttatcggtggggatcctgggattgggaaatcaactcttctcctacaagtctcaacccagttgtcccaagtggggacagttctctatgtcagtggggaggagtctgcccagcagattaaactacgtgcagagcgcttaggtgatattgatagtgagttttatctctatgcagagaccaatatgcagagtgttcgtgcagaagtggagcgtatccagccagactttctcattattgattccatccagaccatcatgtctcctgagatttcaggggtgcaggggtctgtttctcaggtgcgtgaagtgaccgctgaactcatgcagttggccaagaccaataacattgccatctttatcgtaggtcatgtgaccaaagaaggaaccttggctgggcctcgtatgttggagcatatggtggatacggtgctttactttgaaggggagcgtcaccacacctttcgtattttgagagcggtcaaaaatcgttttggttccactaatgagattgggatttttgagatgcagtcgggcggcttggttgaggtactcaatccgagtcaagttttcctagaagagcgtttggatggggcgactggttcctccatcgttgtaaccatggaagggacgcgtccgattttggcggaggttcaggctttggtaacaccgaccatgtttggaaatgccaagcgtactacgacaggacttgattttaaccgtgctagcttgattatggctgttttggaaaaacgggcagggcttctcttgcaaaatcaggatgcctatctcaaatctgctggtggtgttaaattggatgaacctgcgattgacttggctgttgcagttgctattgcttcgagctacaaagacaagccaactaatcctcaggaatgttttgtcggagaactgggcttgacaggagagattcggcgcgtgaatcgtattgagcaacgcatcaacgaagctgctaaactgggctttactaagatttatgtacctaagaattccttgacaggaatcactctgcctaaggaaattcaggtcattggcgtgacaacgattcaggaagtcttgaaaaaggtctttgcataatccgtgacaaattctcttaaaaatgataagataggagaaatatttgactatcaaattttcaaggagggaatcgtgtcgtattttgaacagtttatgcaagccaatcaggcttatgttgccctacatgggcagttaaatctgccacttaaacctaaaaccagagtagccattgtgacctgtatggactcacgtttgcacgttgcgcaagctctaggtttggcacttggggatgctcatattttgcggaatgcaggtggtcgagtgactgaggatatgattcgttctctagttatttcccagcaacaaatggggacaagagaaattgtggtattgcatcatacagactgtggtgctcagacctttgaaaatgaaccttttcaggagtatttgaaggaagaattgggtgtcgatgtgtcagaccaggacttcttgcccttccaagatatagaagagagtgtacgcgaggatatgcaactgcttatcgagtctcccctaataccagacgatgtcattatctctggtgccatttacaatgttgatacaggaagtatgacagtcgtagaattataaatacttcatttagaaagaaagtgtatgaagaaaagcaatattttatttatttttattttattgctatgtattggtttacagtatgaaaccatctactatacggacggttcgaggtcaggtgcggaatatggactaatgggagtttctatctttctagctctcttttacatgattccggctctttattttctcttccgtattgggaaaaatgggaattgccaaagaaggttttgattctgtctttattgggagggatgttcctttcaggctggttgtctagttttgctaatacttatatccatgatttactgggggttcttttcccagatagtccatttttaaatgcctttgaaagtgctattgcggctcctttggtagaagaacccttgaaattattgtcacttgtttttgttttggctttgattcctgtgcgaaaattaaaatctttgtttttacttggaattgcttccggtttgggattccaaatgattaaggatattggttatattcgtacggatttgccagagggctttgactttactatttcgcgaattttagagcgtatcatctcaggaattgcctctcactggactttttcaggtctagctgtagtaggtgtttacttgctttacagagcctataaaggacagaaggttggcaagaaacagggccttatttttctaggtttagccttgggaactcacttcttgtttaactctccttttgtggagttggaaacagagttgcctttagcgattccagtggttacggctattgctctctatggtttttatcatgcttattgctttgttgagaaacacaatgagttgatgacctagaatatttttcaaaagaatgatgcaagggtacaaatatggtgcccttcttttatttttgattgaaaaatagtgcaaaaagcgctacaatggtagatggaaaatcttgtgaaaagcacaagttatacatatataccggaggaaatcatgtctttttctgatttaaagctgtttgccctttcttctaataaagaattggcagaacgtgtggcgcaggagattgggatagagttggggaaatcaagtgttcgccaattttcagatggagagattcaggtcaacattgaagaatcaatccgtgggaaacacgtctttatcttacaatcaactagttcgcctgtaaatgacaatctgcttgaaattttgattatggtagatgctttgaagcgtgcgagtgcagaatctgtcaatgttgtcatgccttactatgggtatgcacgtcaggatagaaaggcgagagcgcgtgagccaatcacttcaaaacttgtcgcaaatatgcttgaagtagctggagtggatcgtttattgaccatcgacttgcatgctgcgcaaattcaaggattctttgatattcctgtggatcatttgatgggtgctcctctgattgcagattattttgagcgtcgtggtatggttggttctgactatgtggttgtcagcccggaccatggaggggtgactcgtgctcgtaagttggcagaatttttgaaaacatctatcgctattattgataaacgtcgtagcgttgataagatgaatactagtgaagttatgaatatcatcggtaaggttgaaggcaagacttgtatcttgattgatgatatgattgataccgctggaacgatttgtcatgcggcagatgctcttgcggaagctggtgctgttgaagtctatgcaagctgtacgcacccagttctttctggtcctgctacggacaatatccaaaaatcagctattaagaaattggttgttttggataccatctatctgccagaagagcgtttgattgataagattgagcagatttcaatcgctcatctcctaggggatgctatcgtacgtattcatgaaaaacgaccactttctccacttttcgatattgagaaaaaaatttaatgaccaagcctgagatgattctcaggttttttcgtcttttttccgaataaatagatagtagcggtgaatctagtaaagctagatttaaaactgtgatataataaaaagagaagaaatatgactgtacgtcatcagaagtttcagcgaccatcatttttgaacagtgatagcacttgaatcgacgctttctaaggagaattcttgtaggcataccagtcgtttcaagataaggaattttagaaggtttttgaaagtcatatttcttcaattggtttccgcactcagggcaagatggggcgtcgtagtccagtttggcgatgatttccttgtgtgtatccttattgatgatgtttaaaatctggacattagggtctttaatgtctagtaattttgtgataaaatgtaattgttccatatgattctttctaatgagttgttttgtcgcttttcattataggtcatatgggactttttttctacacaaaataggctccataatatccataggggatttacccactatggatattatggagccattttacaacagtgcctcaaattcagatactgacatacctaattgctggctggcaacctcagaagtcagaagaccttggcgtactatgtctaggaaggcaaaaagtttcctttctgcccttccttcaactttcccacgctctagtccttgttcaaggccttcagccctagcagtttccaaggcatagtcctgtgctaacaagacttgttcttctcgcatatgtagttgactaaacattttcctgtcctcctcggaccagctcttgtagtccagcagttgatttgcttgggtaatggctcgttgcggttgctgggtaaagggcttgttgccgaaaaactccaaccatggcttgcgaaccttgtctttgctggtttctctgtattttttaattccaagaatgccatcttaaccagatggttttcctgtccattgttggtaatcgccaatacctcacctgttgtgtcttcgcgcatactaaagctatgaaaagccaggtcatctgagaaataattactatccacgatagcaatggcgtaaacaggagcgatgtgtttgtagctctagtgagtatcaccttctcgctgacgaattttttcaagattttgattaacctgactgcacaggtaagcccacaagtgattgatgaaaaaattctgatgatggacttgaatctcaataattacttgagtaccgttatccaactccgccaagacgtctatactggtataaaaatcctgcaccgagtaaggcatggagagtaatacgtgaatatcgcttccctccaaaatggtcacattttttgctggcaagtccagcatatcgcgaataaattgacaagtgatttctggattgctgaatattttcttagcaatcaaatcattagttgggctgatgcccggatgtctgagaatcctcctattcctccttctatagtgagttgaaataagatgtgaataactctatcaggaaagtcaaattaatttatagaaatattttagcagtcaaggtgtactattatagattcaatatactatattatagcacatttttaaatctaggtttactaaattctctggctctatctatttattcggaaaaagtttgaaaaatacttgctctagctcttcccaatggtattttttgattctttcctttataatgggtgtatggataagaaaaaattattattgattgatgggtcttctgtagcttttcgggcgttttttgcgctgtatcagcagttggaccgttttaagaatgtggctggtttgcataccaatgcgatttatggttttcagttgatgttgagtcatttattggagcgggttgagccgagtcatattttggtggcttttgatgcgggaaagacgaccttccggacagagatgtatgcggactataagggtggtcgggccaagactcctgatgagtttcgtgagcaatttcctttcattcgtgagttgctggatcatatggggattcgtcactatgatctggctcagtatgaggcggatgacatcattgggacgctggataagctagcagagcaggatggttttgatattactattgtcagtggggacaaggatttgattcagctgacggatgagcatacggtggttgaaatttccaagaaaggtgtggctgagtttgaggcctttacgccagattacctcatggaagaaatgggcctcacaccagctcagtttatcgatctcaaggcgctcatgggtgataagtcggataatatccctggggtgaccaaagtcggtgaaaagacgggtattaagctcttgctggagcatggttcgcttgaggggatttatgaaaatattgatggaatgaagacttctaagatgaaggaaaatctcatcaatgacaaggaacaggcctttttgtctaaaacactagcgaccattgataccaaggcaccgattgcgattggtttagaggacttggtctatagtggtccagatgttgaaaatcttgggaaattctacgatgagatgggcttcaaacagctaaagcaggctttaaatgtgtcgtcagctgatgtgtctgagagtttggattttactattgttgaccaaatcagtcaagatatgctgagtgaagagtctatcttccactttgagctttttggtgagaattaccatacggataatttggttggatttgtctggtcttgtggggataagctctatgccacagacaagcttgagctgttgcaagacccgattttcaaggatttcttagaaaaaacatctctgagagtttatgactttaagaaggttaaagttcttttgcaacgttttggtgtggatttgcaggcgcctgcttttgacatccgtttggctaaatacctcctttcgactgtggaggacaatgaaattgcgaccatcgctagtctttatggtcagacttacttggttgatgatgaaactttctacggtaagggtgttaaaaaggccattcctgaacgtgagaaattcttggaacacttagcttgtaaacttgctgttttggtagaaacagagcctattttacttgaaaaactcagcgaaaatgggcaattagagcttctttatgatatggagcaacctctggcttttgtccttgccaagatggaaattgctgggattatggtcaagaaagagaccttgcttgagatgcaggctgaaaatgagcttgtcattgaaaaactgactcaagagatttacgagctggctggtgaggagtttaatgtcaactcgcctaagcagttgggcgtgcttctctttgagaaattgggacttcctctagaatacactaagaaaaccaagacaggttattcgacagcagtggatgttttagagcgtctcgctcctattgctccgattgttaagaaaatcctggattaccgtcaaattgctaagattcaatctacttatgtaattggcttgcaggactggattttggctgatggaaagattcatactcgctatgtgcaggatttgacccagaccgggcgtttgtctagtgtggatccaaacttgcaaaatattcctgcccgattggaacaggggcgcttgattcggaaggcttttgtgccagagtgggaggatagtgtgctactcagctctgactattcacagattgaattgcgcgttttggcgcatatttctaaggatgagcacttgattaaggccttccaagagggggcagatatccatacttcgacagccatgcgggtctttggcattgagcgtcctgatgatgtgactgcaaacgaccgtcgcaatgccaaggcagttaactttggagtggtttatgggatttcagactttggcttgtctaataatttgggaattagtcgtaaggaagccaaagcctacattgatacctactttgaacgttttccaggtattaaaaactacatggatgaagtggtgcgggaggcgcgtgataagggctatgtagagaccctctttaagcgtcgccgtgagttgccagatatcaattcgcgcaacttcaatattcgtggttttgcggagcgaactgctatcaactcacctatccagggttcggcagcagatattctcaagattgccatgattcagctggataaagccttggttgcaggtggttatcagactaagatgctgttacaagtgcacgatgaaatcgtccttgaagtgcctaaatctgaattggtagagatgaaaaaattggtgaaacaaaccatggaagaagccattcaactcagtgttcctcttatcgcagatgagaatgaaggggcaacctggtacgaggctaaataaaaagggggctagtcctccttttttgtagtataattctgcaaaccttttcaaaatgtgctatactgatgaaaaaggaggatttctatgagtcaagaatttatcaatccaagtgatggcgtgattcgtcagtatctcgcaacgagtaaaacccttgctgtggtgggtttgtctgaccgtgaagaaacaaccagcaatcgagtaacaaaggaaatgcaggctcggggctataaaatcatcccagtcaattcccaaggcggcaggtggcgaaatcttgggtgaaaaggcttatgctagcctcgctgaaattccttttcctgtagatattgtcaatgtttatcgtcgcagtgaatttctgcccgatgtggcgcgtgattttctcaaagctgatgccaagattttttgggcacagctaggacttgaaagtttagaagcgaaagagattttgcgtgatggtggatgtgatgatatcgtgatgaatcgctgtatcaagagagaacatactcgcttgattgaggaagcataagaaaaaggtagctgatgggctaccttttgtgttatactcaatgaaaatcaaagagcaaactaggaaactagccacgggctgctcaaaacactgttttgaggttgcagatagaactgacgaagtcagctcaaaacactgttttgaggttgtagatacgactgacgaagtcagctcaaaacaccgttttgaggttgcagatagaactgacgaagtcagctcaaacaccgttttgaggttgcagatagaactgacgaagtcagtaacatatacctacggcaaggcgacgttgacgtggtttgaagagattttcgaagagtattagaaaatgccgataagggtctgcataccaagagtggtgaggatgatggcaatccagcagatggctccaagaagaatggattttccactggatttgaccatagcgaccagattggttttgagaccgatagcactcatggccatgacaataaggaatttagagagttctttgagaggagtaaagaaactactggacacacctagagaggtgagtagtgtagtgaggagagaggcaaggataaagtaaaggataaaaagtgggaagacttttttcagttgcaggctttgcttgttttcttgttggcgactttgccagtaggatagaaagagcgtgatagggataatggccaaagtacgtgtgagtttaacaatggttgcagactcgagggtattgctttggtaaagactgtcccaagcgctggcggcagccgttacagaggaagtgtcgttgaccgcagtccctgcaaagagggcgaagccttcattggatagatgaagccaggtgccgagggttggaaagatgagcgcagccaagacattgaagaaaaagataacggaaatggcttgggctacttccttttccttagcatcaataacgggcgctgtcgctgcaatggcagaacccccacagatagaagaacctactccaaccaaggtagccagttttgtatccagggcaaagaaacgctggaagaggtaggcaataatcagagctattgagatagtggacaggatgacagggagtgaagattggccaactgcgaagacctgcgagatattgagaccaaaaccaagcaagacaacggcatattggagcaacttcttggaactaaaggtcaaaccagcatccagttgtttataggacgagagaaagggatgtaggagcatgcctatgaaaatggcaaaaacgggcgcgccaaccacagggaagaatcctcctaagtaccaagataggatggaaatgagaaggcaggccaagatacctgctccattttttgatagaaatgacataaaaacctccaaataaaatctattaccattatagacctataaacaggaaaagtaaaatagaaagtggaaagctattctctaatgtatttttgcggtcggggggcttttgtagtataatagagatacgttttgaaagtaggaggtatctatggacttaactaagcgctttaataaacagttagataaaattcaagtttcgttgattcgtcagtttgaccaggctatttcggagattcctggggtcttgcgtttgaccttgggggaacctgattttacaacgccagaccatgtcaaggaggcgggcaagcgagcgattgatcagaaccaatcctactatacagggatgagtggtctgctgactctacgtcaggcagccagtgactttgttaaggaaaagtaccaactggactatgctcctgaaaatgaaatcttggttacaattggggcgacagaggctttatctgcgactttgacggctattttggaagagggagacaaggtacttttgccagctcctgcttatccaggctatgaaccgattgttaacttagttggggcagaaattgttgagattgatacgactgaaaatggttttgtcttgactcctgagatgttggagaaggccattttggagcagggtgataagctcaaggcggttattctcaactatccagccaatccgacaggaattacctacagtcgagagcagttagaggccttggcagctgttttacgcaagtacgaaatttttgttgtctgtgatgaggtttactcagaattgacctacacaggcgaagccatgtgtctctaggaacgatgttgagagaccaggctattattatcaatggtttgtctaaatcgcatgccatgacaggttggcgtttggggctgattttcgctcctgcgaccttcacagcccagttaatcaagagtcaccagtacttggtcactgccgcaaataccatggcgcaacatgctgcggtagaagccttgacggctggtaaaaacgatgcggagcccatgaagaaggaatatatccaacgtcgggactatatcatcgaaaaaatgactgctcttggttttgagattatcaaaccagacggtgccttctatatttttgctaaaattccagcgggctacaatcaagactcctttgcttttctgaaggattttgctcagaagaaggccgttgcctttatccctggtgcagcctttggacgttacggggaaggctacgtccgcctatcttatgcagccagcatggagactatcaaagaagccatgaaacgacttgaggagtacatgagagaagcatgattcagtctatcacgagtcaaggcttggtgctttacaatcgcaattttcgtgaggatgacaagctcgtcaaaatttttacagagcaggttggcaaacgcatgttttttgtcaaacacgctggtcagtctaagctggcgcctgttattcagcccttggtgctggcacgatttctcttgcgaatcaatgatgacggactcagttacatcgaagactatcatgaggtcatgacttttcccaagattaatagtgacctctttgtcatggcctatgcgacctatgtggcagctcttgcagatgctagtttgcaggacaatcagcaggatgctcccttgtttgcttttttgcaaaagactttggagttgatggaagcaggcttggattatcaggttttgaccaatatttttgaaattcaaattttgactcgatttggaatcagcctcaattttaatgagtgtgtcttctgccatcgggttggtcaggcttttgacttttctttcaaatatggagcctgcctctgtccagagcattatcatgaggataagagacgttgtcatctcaatcccaatatcccctatctgctcaatcaatttcaagctattgattttgagactttggagaccatttcgctcaagcctggaatcaagcaagagctacgccaatttatggatcaattatatgaagagtacgttgggattcacctaaaatcaaagaaatttattgattccctagcagactggggacaattactaaaagaggaaaagaaatgaaaaaaatcgcagtagatgccatggggggcgattacgcacctcaggccattgttgagggtgtcaatcaagccctatctgacttttcagatatcgaggttcaactttacggagatgaagctaaaatcaagcaatatctgacagcgacagagcgcgtcagcattatccatacggatgagaagattgattcggatgatgaacctacgagagctattcggaataagaaaaatgccagtatggtattggcagccaaggctgtcaaagatggtgaagcagacgctgtcctttcggctgggaatacaggtgccttgttggcagcaggattcttcatcgtgggtcgtatcaagaatatcgaccgtcctggactcatgtctaccttgcctaccgttgatggaaaaggttttgacatgctagaccttggtgccaatgcagaaaatacagcccagcacctccatcaatatgcggttctaggttccttctatgctaaaaatgtccgtggcattgcgcaaccacgcgttggtttgctcaacaacggaacagagagtagcaagggcgacccgcttcgtaaggaaacttatgaattactggcggctgatgaaagtttgaactttatcggaaacgtggaagcgcgtgatttgatgaatggcgttgcagatgttgttgtggcagatggtttcacgggaaacgctgtgctcaaatccatcgaagggacagctatgggaatcatgggcttgctcaagacagctattacaggtggtggtcttcgagcgaaactaggtgccctccttctcaaggacagcctcagtggtttgaaaaaacagctcaattattcagatgttggtggagcggtcttgtttggtgttaaggcacctgttgtcaagactcatggctcaagcgatgccaaggctgtttatagtacgattcgtcagatccgtaccatgctagaaacagacgtggttgcccagactgcgcgtgaattttcaggagaataaaagagatgacagaaaaagaaatttttgaccgtattgtgaccattatccaagagcgacagggagaggactttgtcgtgacagaatccttgagtctgaaagacgatttggatgcggattctgttgacttgatggagtttatcttgactctggaagatgaatttagtatcgaaatcagcgatgaagaaattgaccaactccaaaacgtaggagatgtggttaaaatcattcaaggaaaatagcaatcggagttccaagtcaacggaagtagatggtttttagaaatgagaaatatcggacaagctggtaaaatcttggctgacagtggttatcaagggctcatgaagatatatcctcaagcacaaactccacgtaaatccagcaaactcaagccgctaacagttgaagataaagcctgtaatcatgcgctatctaaggagataagcaaggttgagaatatctttgccaaagtaaaaacgtttaaaatgttttcaacaacctatcgaaatcatcgtaaacgcttcggattacgaatgaatttgattgctggtattatcaatcatgaactaggattctagttttgcaggaagtctaatagtaaaaaagtgattagaaaacatcttttttaaaaatagagatgattttgaaacaaaaaagctaattcaagacgtttcgatgccaattcaagatttggatgaaaaaaattaatagatactgttatactaaacttgtcaagtttgtaacaagacaaatattaaaaataaaaaagaggtattcgttatgaatacaaaaacgatgtcacaatttgaaattatggatactgagatgcttgcttgcgttgaaggtggcggatgcaattggggagattttgccaaagcaggtgttggaggaggagcagcacgaggtcttcagctaggaattaaaacaagaacatggcaaggtgcagcaactggtgctgtgggaggagctatacttggaggtgtggcctatgcagcgacatgttggtggtaattatggattttaaaagttttattattggtttagtagttggtatatttggtccttatatggatgatttaattagaaaaaaatttttaaagtcttcggagaagaaaacagaaaaatctgttaaaaaataatcaaaactataaatgatgaatctgaatcaaaattattttgcgcatgtaaagaggagtcttatagtaacgagtcaaaaaaggagtaactatgaatcgtaatttagaacggtgttatctattctgactaggaatagatcataccagaggtagcttagaaatagcagagacattagaaattgaagtaataaataggatgtcgtaagtgttactatcaatgatttatttgtttcaagcttgcctagggtgacagtaaaaaatcaatttcctttcaatagcatatttttagtgggcaggactcttgttctgcctatttttttatccaaaaagtgcagttgggagggagataggctcatttgggaaggaagtccagtttttgtttagtgattggggtaagatagttgttatcagatgagttaatactcttcgaaaatcaaattcaaaccacgtcaacgtcgccttgccgtatatatgtgactgacttcgtcagtcctatctacaacctcaaaacagtgttttgagcagcctacggctagtttcctagtttgctctttgattttcattgagtattagggaaaaggagatgaatatgaaatttgggaaacgtcattatcgtccgcaggtggatcagatggactgcggtgtagcttcattagccatggtttttggctactatggtagttattattttttggctcacttgcgagaattggctaagacgaccatggatgggacgacggctttgggcttggtcaaggtggcagaggagattggttttgagacgcgagccattaaggcagatatgacgctttttgacttgccggatttaacttttccttttgttgcccatgtgcttaaggaagggaaattgctccactactatgtggtgactgggcaggataaggatagcattcatattgccgatccagatcccggggtgaagttgactaaactgccacgtgagcgttttgaggaagaatggacaggagtgactctttttatggcacctagtccagactataagcctcataaggaacaaaaaaatggtctgctctcttttatccctatattagtgaagcagcgtggcttgattgccaatatcgttttggcaacactcttggtaaccgtgattaacattgtgggttcttattatctgcagtctatcattgatacctatgtgccagatcagatgcgttcgacactagggattatttctattgggctagtcatcgtctacatcttccagcaaatcttgtcttacgctcaggagtatctcttgcttgttttggggcaacgcttgtcgattgacgtgattttgtcctatatcaagcatgtttttcacctccctatgtccttctttgcgacacgcaggacaggggagatcgtgtctcgttttacagatgctaacagtatcatcgatgcgctggcttcgaccatcctttcgattttcctagatgtgtcaacggttgtcattatttcccttgttctattttcacaaaataccaatctctttttcatgactttattggcgcttcctatctacacagtgattatctttgcctttatgaagccgtttgaaaagatgaatcgggataccatggaagccaatgcggttctgtcttcttctatcattgaggacatcaacggtattgagactatcaagtccttgaccagtgaaagtcagcgttaccaaaaaattgacaaggaatttgtggattatctgaagaaatcctttacctatagtcgagcagagagtcagcaaaaggctctgaaaaaggttgcccatctcttgcttaatgtcggcattctctggatgggggctgttctggtcatggatggcaagatgagtttggggcagttgattacctataataccttgctggtttactttactaatcctttggaaaatatcatcaatctgcaaaccaagcttcagacagcgcaggttgccaataaccgtctaaatgaagtgtatctagtagcttctgagtttgaggagaagaaaacagttgaggatttgagcttgatgaagggagatatgaccttcaagcaggttcattacaagtatggctatggtcgagatgtcttatcggatatcaatttaaccgttccccaagggtctaaggtggcttttgtggggatttcagggtcaggtaagacgactttggccaagatgatggttaatttttacgacccaagtcaaggggagattagtctgggtagtgtcaatctcaatcagattgataaaaaagccctgcgccagtacatcaactatctgtctcaacagccctatgtctttaacggaacgattttggagaatcttcttttgggagccaaggaggggacgacacaggaagatatcttacgggcggtcgaattggcagagattcgagaggatatcgagcgcatgccactgaattaccagacagaattgacttcggatggggcagggatttcaggtggtcaacgtcagagaatcgctttggcgcgtgctctcttgacagatgcgccggtcttgattttggatgaggcgactagcagtttggatattttgacagagaagcggattgtcgataatctcattgctttggacaagaccttgattttcattgctcaccgcttgactattgctgagcggacagagaaggtagttgtcttggatcagggcaagattgtcgaagaaggaaagcatgctgatttgcttgcacagggtggcttttacgcccatttggtcaatagctagaaagaggagaggatgaaaccagaatttttagaaagtgcggagttttataatcgtcgttaccataatttttccagtagtgtgattgtacccatggcccttctgcttgtgtttttacttggctttgcaactgttgcagagaaggagatgagtttgtccactagagctactgtcgaacctagtcgtatccttgcaaatatccagtcaactagcaacaatcgtattcttgtcaatcatttggaagaaaataagctggttaagaagggggatcttttggttcaataccaagaaggggcagagggtgtccaagcggagtcctatgccagtcagttggacatgctaaaggatcaaaaaaagcaattggagtatctgcaaaagagcctgcaagaaggggagaaccactttccagaggaggataagtttggctaccaagccacctttcgcgactacatcagtcaagcaggcagtcttagggctagtacatcgcaacaaaatgagaccatcgcgtcccagaatgcagcagctagccaaacccaagccgaaatcggcaacctcatcagtcaaacagaggctaaaattcgcgattaccagacagctaagtcagctattgaaacaggtgcttccttggccggtcagaatctagcctactctctttaccagtcctacaagtctcagggcgaggaaaatccccaaactaaggttcaggcagttgcacaggttgaagcacagatttctcagttagaatctagtcttgctacttaccgtgtccagtatgcaggttcaggtacccagcaagcctatgcgtcagggttaagcagtcaattggaatcccttaaatcccaacacttggcaaaggttggtcaggaattgacccttctagcccagaaaattttggaggcagagtcaggtaagaaggtacagggaaatcttttagacaaggggaaagttacggcgagtgaggatggggtgcttcatcttaatcctgagaccagtgattctagcatggttgcagaaggtgccctactagcccaactttatccatctttggaaagagaagggaaagccaaactcacagcttatctaagttcaaaatatgtagcaagaatcaaggtcggtgattctgttcgctatactacgactcatgatgccgggaatcaacttttcctagattctactattacaagtattgatgcgacagctactaagactgagaaagggaatttctttaaaatcgaggcggagactaatctaacttcggagcaggctgaaaaacttaggtacggggtggaaggccgcttgcagatgattacgggcaagaaaagttacctacgttattatttggatcaatttttgaacaaagagtaatgttcgtgtttttagagttaaataatttttaaactgtgagaaagattcttcttgcagttttttctttacaatttttgaaaaacatctactatttattcggttaaattcttgtgttttttggttttttgtggtaaaatgtgctcaagtaatacgaaaggcgaactttaaaatgtcaaaacaattgatctattcgggaaaagctaaagatatctatacaactgaggatgaaaatcttattatttcaacttacaaggaccaggcgactgctttcaacggtgtcaagaaggagcagattgcaggtaagggagtcttgaataatcagatctcatcttttatttttgagaaattaaatgtggctggtgtggcgactcactttgtggagaaactttcagacacggaacaactcaataaaaaggttaagattattcctttggaagtcgtgctccgcaactatactgctggttccttttcaaaacgttttggtgtggatgagggaatcgccttggagactccgattgtcgaattttactacaaaaatgatgatttggatgatccatttatcaatgatgagcatgtgaaattcctacagattgcgggtgaccagcagattgcctacttgaaggaagaaacgcgtcgtatcaatgaactattgaaagtctggtttgctgagattgggcttaaattgattgactttaagctagagttcggttttgacaaggatggcaagattatcttggcagacgaattttcaccagataactgccgcttgtgggacgctgatggcaaccacatggataaggatgttttccgtagaggattgggagaactaaccgacgtttatgagattgtttgggaaaagttgcaggaattgaaataatctgtttgcaacggaaaaccttcgtctctcaactaaaaggactcaggctgaaaaggtcccccagaccttttcactctgtagagaactaggtgaactaacagatgtttacgaaattgtctgggaaaagttgcagggtttaaaataacaacctcaaggctgtttgggaatattgcaagagctgaaataaaggaataagaattgatggataaacgtatttttgttgaaaaaaaggctgattttcaggtcaagtcagagagtttggttagagagctccagcacaacttgggactgtcaagcttgaaaagtattcgtattgtgcaagtatatgatgtatttgacttggctgaggacttgtttgcacctgcagagaagcacattttctctgagcaggtaaccgaccatgttttagatgaagtatctgtgcaggcggatcttgctaactatgctttctttgccattgaaagtctgccagggcagtttgaccagcgtgcagcttcgtcacaggaagccttgcttttgttgggaagttcgagtgacgtgacagtcaacacagcccaactttacttggtgaataaagatattgatgcgactgagttggaagctgtcaaaaactacctgctcaatccagttgattctcgtttcaaggatatcacgacagggattgccaagcaggagttttcagagtcagacaagaccattcccaaattgactttctttgaaagctatgcagcagaagactttgctcgctacaaggccgaacaagggatggccatggaagtggatgatttgctctttatccaagactactttaagtcaatcgggcgcgtgccaactgagactgaactcaaggttttggacacttactggtctgaccactgccgtcatacgacttttgagacagagttgaaacacatcgacttttcagcttctaaatttcaaaagcaattgcagtcaacctatgacaagtatattgccatgcgcgaggaattaggtcggtctgaaaaaccacaaaccttgatggatatggcgactattttcggtcgttatgagcgtgctaatggacgattggatgatatggaagtctctgacgaaatcaatgcctgctcagttgaaattgaagtggacgttgatggtgtcaaggaaccttggctcctcatgtttaaaaacgaaacccacaaccatccaacagaaattgagccatttggtggagcggctacctgtattggtggagctattcgtgatccgttgtcaggccgttcctatgtttaccaagccatgcgtatttcaggtgctggtgatattacagcaccgatttcggaaactcgcgctgggaaattgccacaacaagtcatttctaaaacagcagctcatggttattcttcatatggtaaccagattgggcttgcaacaacctacgttcgtgaatacttccacccaggctttgtagctaaacgtatggaacttggtgccgttgttggtgcgactcccaagggcaatgttgtccgtgaaaaacctgaagcaggtgatgtgatcatccttctcggaggcaaaacaggtcgtgatggtgtcggtggtgcgacgggctcttctaaggttcaaacagttgagtctgtagagactgctggtgctgaggttcaaaaaggaaatgccatcgaagaacgcaagattcagcgcctcttccgtaatggcaatgtcactcgtctgatcaagaagtccaatgactttggggcaggcggtgtctgtgtggctatcggtgaattggcagacggtcttgaaatcgacctcaacaaggtgcctcttaaataccagggcttgaatggtacagaaattgccatctctgaatcacaagaacggatggcggtcgtggttcgtcctgaagatgtggatgccttcgttgccgaatgtaacaaagaaaatattgatgctgttgtggtggcgacagtaactgaaaaaccaaatcttgtcatgcactggaatggtgagacaatcgttgacttggagcgtcgtttccttgacaccaatggtgtgcgcgtggttgtcgatgccaaagttgtggacaaggatgtcaaactcccagaagagcgtcaaacatctgctgaaacactggaatcagatacccttacggttctatctgacctcaaccatgcaagtcaaaaaggattacagactatctttgactgctctgttggacgctcaacggttaatcacccacttggtggtcgttaccaactcacaccaactgaggcatctgtgcagaaattgccagttcaacacggtgtgactcatactgcgtcggtcattgctcaaggtttcaacccatatgtagctgaatggtctccataccacggtgctgcttatgcggttatcgaagcaactgctcgtttggtggctgctggtgccaactggttcaaggctcgtttctcttaccaagagtatttcgagcgtatggataaacaagcagagcgtttcggtcagccagtagctgctcttctaggttctattgaagcacaaattcagcttggcttgccatctatcggtggtaaggactccatgtctggtacctttgaagaattgaccgttccgccaaccttggctgcctttggggtgacgacggcagatagccgtaaggtgctctctccagaatttaaagctgttggggaaaatatctactacatcccaggtcaagccctctctgcagagattgattttgacttgattaagaaaaattttgctcagtttgaagccatccaagctgaccataaagtgacatctgcatcagctgtcaaatacggtggtgtagttgaaagtttggctcttgctacctttggaaactatattggtgcagaggtgaccttgcctgaacttgaaacagctttgacagctcaattaggcggctttgtcttcacatctcctgaagaaattgctggagtagagaaggttggacaaacgaaagcagactttacactgactgtcaacggtgtgaagctagatggacacaagcttgacagtgcatttcaagggacattggaagaagtttacccaacagaatttacccaagcgaaagaactagaagaagtaccagctgtggcatcagatgttgtgattaaagccaaagaaaaggttgaaaaacctgtggtttacatcccagtctttccaggaaccaactcagaatatgattcagctaaggccttcgaaaaagaaggtgcagaggtcaatttggtgccattcgtgaccttgaatgaagaagctattgtcaagtcagttgaaactatggttgacaatatcgacaagactaatattctcttctttgctggtggattctcggctgcggatgaaccagatggttcagctaagtttatcgtcaatatcctgcttaatgaaaaagtgcgtgtggctattgatagctttatcgcccgtggtggtttgattatcggtatttgtaatggattccaagccttagtcaaatcgggtctcctaccctacggaaactttgaagctgctaacagtactagcccaaccctcttctacaatgatgccaaccaacacgtggccaagatggtggaaactcgcattgccaataccaactcaccatggttggttggtgtgcaagtgggcgatatccacgctattcctgtttcgcacggtgaagggaagtttgtcgtgacggctgaggaatttgcagagctccgtgacaatggacaaattttcagccaatacgttgactttaacggtaaaccaagtatggattctaagtacaatccgaatggttctgtccatgccatcgaaggaattaccagcaagaatggtcaaatcatcggtaagatgggccactcagaacgttatgaggatggtcttttccaaaatatcccaggcaataaagaccaacacctgttcgcatcagcggttaaacatttcactggaaaataagacttacagattttctaatagatagtatcagtaatgtaaaagtcatgtaaatctagctcttgatgattacaaatgaaaattaggtataaaaaatgacatacgaagtaaaatctcttaatgaagaatgtggtgttttcggtatttggggacatccagatgctgctaagttgacctattttggactccacagtcttcaacaccgtggtcaggagggggcaggaatcctctccaatgatcaaggacaactgaagcgccatcgtgacatggggcttttatcagaagttttcagaaatccagctaatttggataaattgacaggagctggtgcgattgggcatgtgcgttatgcgactgctggcgaagcttctgtagataacatccagcccttcctcttccgttttcacgatatgcagtttggtttggctcataatggaaatctgaccaatgcagcctctctcaagaaagaactggaacaaagaggagcaattttcagcgcgacttcggactctgaaatcttggctcacctcattcgtcgcagtcataatcctagcctgatgggcaaaatcaaggaagcgctcagccttgtcaaaggtggttttgcctatatcttgctgtttgaggacaagttgattgcggctcttgacccaaatggattccgaccgctttcgattggtaaaatggctaatggagcagttgttgtatcttctgaaacctgtgcttttgaggtcattggtgccgagtggattcgtgatttgaagccaggtgagattgtgatcattgatgacgagggcattcagtatgacagctatacagatgatacccagttggcggtttgttctatggagtatatctactttgctcgccctgattctaatatccacggtgtcaatgtccatacggcacgtaagagaatgggagcgcaattggcgcgagaatttaagcatgaggcagatattgtagttggtgtgcccaattcttccctaagcgcggctatgggatttgcggaagaatcaggcttaccaaatgaaatgggtctgatcaaaaaccaatacacccagcgaacttttatccaaccgactcaagaattgcgggagcaaggagtgcggatgaaactgtctgctgtttcgggtgttgtcaaaggcaaacgtgtggtcatggtggatgattccattgtacgtggaacaacctctcgtcgtatcgttcagctcttgaaagaagcgggtgcgactgaggttcacgttgccattggaagtcctgcactagcgtatccatgtttctacgggattgatatccagacccgtcaggagctgattgcagccaatcatacggtcgaagaaactcgccaaatcattggtgcggacagtctgacttatctttcaattgatggcttgattgagtcgattggtatcgaaacagatgcgccgaacggtggtctctgtgtcgcttactttgacggtgactacccaacgcctctttatgactacgaagaagactatcgtagaagtttggaagaaaagaccagtttttacaagtaggcgacagattctccattaaagaaaaggaaaaaataaatgacaaataaaaatgcatatgcctcacgtctcactactgactaaaggcttaagcatttagtcagtagacgctttgtcctataggatcaaagctagagccctgactagtatttttagataaaaagatggtttatctaaaaatacgtcgcagtctttctcaaaaaaagaaaaggaaaaataaaatggcaaataaaaatgcgtacgctcaatctggtgtggatgttgaagcgggttatgaagttgttgaacggattaaaaagcacgtggcccgtacggagcgtgcaggtgtcatgggagctcttggtggctttggtggtatgtttgacctttccaagactggggttaaagaacccgtcttgatttcagggactgacggtgtcggaaccaagctcatgttggctatcaagtacgacaagcacgataccatcgggcaggactgtgtggccatgtgtgtcaacgacatcattgctgcaggtgcggaacccctctattttctcgactacgtagcgacagggaagaatgaaccagctaagctagaacaagtggttgctggtgtggcagaaggttgtgtgcaggctggtgctgccctcatcggtggggaaacggctgaaatgccgggcatgtacggcgaagacgactatgacttggctggttttgcggtcggtgtggctgaaaaatctcaaatcattgacggttcaaaggtggtagagggagatgttcttctcggacttgcttcaagtgggattcactcaaatggttactctttggttcgtcgtgtctttgcggattacacaggtgaggaagtcctaccagaattggaaggcaagaaacttaaggaagttctacttgagccgactcgtatctatgtcaaggctgtcttgccgctcatcaaagaagagttggtcaacggcattgcccacatcacaggtggtggctttatcgaaaatgtccctcgtatgtttgcagatgacctagctgctgaaattgatgaaagtaaagttccagtgcttccaattttcaaaacccttgaaaaatacggtcagattaaacacgaagaaatgtttgaaatcttcaatatgggtgtgggacttatgttggcggtcagccctgaaaatgtagagcgtgtaaaagaattgttggatgaagcagtctatgaaattggtcgcatcgtcaagaaagaaaacgaaagtgtcattatcaaatgaaaaaaatagcggtttttgcctctggtaatggctcaaattttcaggtgattgccgaagaatttccagtggagtttgtcttttcagaccatcgtgatgcctatgtgcttgagcgtgcaaagcagctcggcgttctgtcctatgcttttgaactcaaggagtttgagagcaaggcagactacgaagcagcccttgtcgaactcttggaagaacaccagattgacttggtttgcctagcaggctacatgaaaatcgttggaccaaccttattgtcggcttatgaaggtcggattgtcaacattcatccagcctacttgccagaatttccaggagctcatgggattgaggatgcttggaatgctggcgtgggtcagtctggtgtgaccattcactgggtggattcgggtgtggatacaggccaggtcatcaaacaggttcgtgtgccacgactagctgatgataccattgacagatttgaagctcgcatccatgaagcagagtacaggctgtatccggaagtagtgaaggctctatttacagattgactttttgatgattcatatgatatctttgattttaaattggagtcagtgtttgttgaagacggcttcaaacggaggtatttgtaatgttagaatctaaaaaaacaactcgatatgtattttatgtctatctgatgttattaacttggggaatcttatttaagtttgaaacaaatcctgaatttatagcatttttcttagctccaaggtatatcaattggattccattttcagaaccactaatagtcgatggaaaaattgtttttgctgaaatgttatttaatctgattttctttattccattaggtgtttgtttccctttgataaaaactaatttatctagtttaagaatagtcgggacaggtttcttgattagtttattgtttgagtgcttacagtatattttagcaataggtataacagatataacggatttgactttaaatacgctaggtgtctgtgtaggcttactgatttatcaaatttttataagagtgttcaaatcacagactagaaaatggatcaatatcttaggtatgcttagccttggttttgcttatcttgttttactgttactgcatttacttagtgtttaactaatgattaaaaaggagaatataatgactaaacgcgtcttaatcagcgtctcagacaaagcgggcattgttgaatttgcccaagaactcaaaaaacttggttgggagattatctcaacaggtggaactaaggttgcccttgataatgctggggtggataccattgctatcgatgatgtgactggtttcccagaaatgatggacggtcgtgtgaagaccctccacccaaatatccacggagggcttctcgctcgtcgtgacttggatagccacttggaagcggctaaggacaacaagattgagctcattgaccttgtggtggtcaacctttacccatttaaggaaactatccttaaaccagatgtgacttatgctgatgcagttgaaaatatcgatattggtgggccatctatgcttcgttcagcagcgaaaaatcatgccagtgttacagttgtggtagatcctgctgactacgctgtggttttggatgaattggcagcaaacggcgaaacctcttatgaaactcgccaacgtttagcagccaaagtatttcgtcacacagcggcttatgacgccttgattgcagaatacttcacagctcaagtgggtgaaagcaagcctgaaaaactcactttgacttatgacctcaagcaaccaatgcgttacggtgagaatcctcaacaagacgcggacttttaccagaaagctttgcctacagactactccattgcttcagccaaacagctcaacgggaaagaattgtcatttaataatatccgtgatgcagatgctgctatccgtatcatccgtgacttcaaagatagtccaaccgttgtggctctcaaacacatgaatccatgtggaattggtcaagctgatgacatcgagactgcttgggactacgcttatgagtctgacccagtgtctatctttggtgggattgtcgtcctcaaccgtgaggtggatgctgcgacagctgagaagatgcacggcgttttcctcgaaatcatcattgcaccaagctatacggatgaagcgctagccattttgatcaataaaaagaaaaacttgcgtatccttgccttgccatttaatgctcaagaggctagcgaagtggaagcagaatacacaggtgtagtcggtggacttctcgtgcaaaatcaagacgtggtcaaggaaagcccagctgactggcaagtggtgactaaacgtcagccaactgagacagaagcgactgctcttgagttcgcttggaaggctatcaagtacgtcaaatcaaatggtattatcgtgaccaacgaccacatgacacttggtgttggtccaggtcaaaccaaccgtgtggcttctgttcgccttgccattgaccaagccaaagatcgtctggacggggcggtccttgcttcagatgccttcttcccatttgcggataacgtggaagaaatcgccaaagcaggaattaaggccatcatccagcccggtggctctgtccgtgaccaagaatccatcgaagcagcggataaatacggcttgactatggtctttacaggtgtgagacattttagacattaagaagataaaagggaagaaaacagtttctttccttttttggcttaaaatactaactgaaacaagattaaaacgaacttttttgatataatgttggtaaataattcgcaaaagaggttgaggaatgaaactgcttgttgtcggttctggtggtcgtgagcatgcgattgctaaaaagttacttgaatcaaaagacgtggaaaaagtctttgtagctcctgggaatgatgggatgactctggatggtttggaattggtaaatatctctatttccgaacattataaattgattgacttcgcaaagaccaatgatgttgcttggacctttatcggtccagatgatgcccttgctgctggtatcgtggatgattttaaccaagctggacttaaggcctttggtccgactagggctgcagcggagctggagtggtccaaggatttcgccaaggaaatcatggtcaaatacggcgttccgacagcaacatatggcacattttcagatttcgaggaagccaaagcctatatcgaaaagcatggtgcgcctatcgtagtcaaggcggatggcttggcacttgggaagggtgtcgtcgttgctgagacggttgagcaagcggtcgaagccgctcatgagatgcttttggacaataaatttggtgactcaggtgcgcgcgtggttattgaggaattccttgaaggagaggaattttcactctttgcctttgtcaatggtgataagttctacatcatgccaacggctcaggaccacaaacgtgcctatgatggcgacaaagggcctaacacgggtggtatgggtgcctatgcgccagtcccacacttaccacagagtgtagttgatacagcggttgacaccattgtcaagccagttctagaaggggtgattaaagaaggtcgcccttatctgggagttctttacgcagggcttatcctgacagctgatggaccgaaagtcattgagttcaacgctcggttcggagatccagaaactcagattatcttgcctcgcttgacctctgactttgctcaaaatatcacagatatcctggatagcaaggagccaaatatcatgtggacggacaagggtgtgactctgggtgtggttgtcgcatccaagggctacccgctagactatgaaaggggcgttgagttgccagccaagacagaaggcgatgtcatcacctactatgcaggggctaagtttgcggaaaatagcagagcactgctctcaaacggcggacgagtttatatgctcgttaccacagcagataccgtcaaagaagcccaagccagcatataccaagaactataccaacaaaaaatagaaggactcttctaccgaacagatatcggaagcaaggcaattaagtaaagatataagaataacgcgccgtagtcgccaaacacgataatggtcgtcgtggtgaaaagaccagaacagtgaatgttctggtcagggggaaacttggagaccttaggctcaaagtttaggaatgaaaccgaaggtttgcttccgcctccatcacctaagaccattatcaaaaagaaaaataaaaattcacaaaatacgttaatgatcgtatggtttgcgagcgttagcgagctaatatagaacaatcaccgccgttgtgaaagaacgattggatgataatccaatcgttcagggaaattggaagaccttgggtttccaatttaggcatgagacacctttggtggctgctgccgtccctcacaagctaaggtgattgttgaaaaagaggaaaaaggagaagaaatgaaaccagtaatttccatcatcatgggctcaaaatccgactgggcaaccatgcaaaaaacagcagaagtcctagaccgcttcggtgtagcctacgaaaagaaagttgtttccgcacaccgtacaccagacctcatgttcaaacatgcagaagaagcccgtagtcgtggcatcaagatcatcatcgcaggtgctggtggcgcagcgcatttgccaggcatggtagctgccaaaacaacccttccagtcattggtgtgccagtcaagtctcgtgctcttagtggagtggattcactctattctatcgttcagatgccgggtggggtgcctgttgcgaccatggctatcggtgaagctggagcgactaacgcagctctctttgccctccgtctcctctctgtagaagataagtccattgcggatgcacttgccaactttgctgaagaacaaggaaaaatcgcagaggagtcgtcaaatgagctcatctaaaacaatcggaattatcggtggcggtcaactgggtcagatgatggccatttctgctatctacatgggccacaaggttatcgcgctggatcctgcggcggattgcccggtctctcgtgtggcggaaatcattgtggcaccttataacgatgtagacgccctccgtcagttggcagaccgttgcgatgtcctcacttatgagtttgaaaatgtcgacgctgacggtttggatgccgttatcaaggatggacaactccctcaaggaacagatctgctccgcatttcgcaaaatcgtatttttgaaaaggactttttgtcaaacaaggctcaagtcactgtggcaccctacaaggtcgtgacttctagcctagacttggcagatatcgacttgtcgaaaaactatgtcctcaagactgcgactggtggctacgatggtcatggacaaaaggttattcgttcagaagcagacttggaagcagcctatgcgctagcagactcagcagactgcgtcttggaagaatttgtcaactttgaccttgagatttctgtcatcgtgtcaggaaatggcaaggaggtgacgtttttcccagttcaggaaaatatccaccgcaacaatatcctgtctaagaccatcgtaccagcccgcatttctgaaagtctagtagacaaggctaaagctatggcagtgcgaatcgcagaacaactcaacttgtctggaactctctgtgtggaaatgtttgcgacagctgatgacatcattgtcaatgaaatcgccccacgaccacataactctgggcactattctattgaagcctgtgatttctctcagtttgacacccatattctgggtgttctcggagcaccattaccagtcatcaaactccatgcgccagccgttatgcttaatgtcctcggtcagcatgtcgaggctgctgaaaaatatgtcacagaaaatccaagcgcccacctccacatgtatggtaaaatagaagcaaagcataatcgtaagatgggacatgtgactttgtttagtgatgtgccggatagtgtggaagagtttggggaagggattgatttttaggacaagtctatgatacaaattatcgttaatacatttattgaaaagtataagactggagcagttgttgaagtgttgtatgccagtgctgaccaagataaggtacaagctaaatatgaagaactagctgcacaataccccgaaaattatttagctatctataatgtaccgctggatacggatttgaatacactagatcattacccgtctgtgtttattggaaaagaggagtttgagtagaaatcttggtttacctagatagcttattcccaacagcttaagaagaaaggaaaaattaacacatgatcaaccgttactctcgccctgagatggcgaatatttggagtgaagaaaataaataccgtgcttggcttgaggtggaaatcctctctgacgaggcatgggctgagttgggggaaatccctaaggaagatgtggctttgattcgcaagaaggcggactttgacatcgaccgtattttggaaattgagcaggagacgcgccacgatgtggtggctttcacgcgtgcggtttctgagactcttggtgaagagcgcaagtgggttcactatgggttaacttctactgacgtggtggatactgcttatggttacctctacaagcaggccaacgacatcatccgtcgtgaccttgaaaacttcactaatatcatcgctgacaaggccaaggagcacaagttcaccatcatgatggggcgtactcatggtgtgcacgctgagccgacaacctttggtcttaaattagcaacttggtacagcgaaatgaaacgcaatatcgagcgcttcgagcatgcggctgctggtgtagaagctggtaagatttctggtgcggttgggaactttgccaatatcccaccatttgtagaggagtatgtctgcgataaacttggcatccgtgcccaagaaatctctacacaagtccttcctcgtgaccttcacgctgagtactttgcggttcttgccagcattgcgacttcaatcgaacgtatggcgactgagattcgtggtctacaaaaatctgagcaacgcgaagtagaagagttctttgctaaagggcaaaaagggtcttcagcaatgcctcacaaacgcaacccaatcggttctgaaaatatgactggtctggcgcgtgtcattcgtggtcacatgattacggcttatgaaaacgtcgctctctggcatgaacgcgatatttctcactcatcagctgagcgtatcatcacaccagatacgaccattttgattgactacatgctcaaccgttttggaaatatcgtcaagaacttgacagtcttcccagaaaatatgatccgaaacatgaactcgacttttggtcttatctttagccaacgggctatgttgacattgattgaaaaaggcatgacccgtgagcaagcctatgacttggtgcaaccaaaaacagcctactcttgggacaaccaagtagactttaaaccacttcttgaggcagattcagaagtaacatcacgtctcacacaagaagaaatcgatgaaatcttcaacccagtttattacaccaaacgagtggatgatatctttgaacgtcttggactaggtgattaattaaaaaataaacagcgagcttcaatctcgctgtttattttttatcgaaaagacttagtcttcttttcttttagtgagtccataggctgctagtgtggacatgagtcctgcgactactagtcctgcagaatcgtgagttcctgtttcaggaagttttttctctgttaccacaggagctggatcttgaggaagaactttgctttcctcagcaggagcagttgatggagctggttggcttgggatttctagttttggtttttcttcagcaatagcggcttgtccgttttcatcgcctacatgtgttaccatagttccgacttcgactatttgagtaacggcttcctgtgctacgacactatttacaagtgttttcacttccttaccatcggcagaagtgctcacagagtagaagttgctacgatgtccattgacgcccttagtaatgacttgtgtttttcctttgagtaagagtggattttcacaagtcactgtggtaaatggaatttcttcttcttggatatccagtctaggttttacctcagtagttggtgcaagaccactttcatcacccttgtgagttacaggagcgccaacttcaaccacttggtttataacttctttggttacctggctatcaaggactgtttctgttgtttttccattttcagtgagtacagagatgtaatgagttcgttcacctttgactcctgctgtgataatattttcctgaccggctgggaggttaggattttctttcttgataacttcaaatggaatttcttcagttcttgtgatgagttctggtctggtttcaacattggcagccacttcattttcatctaggcttcctgaatgagttacagctggtttgaggccttgaagagcggcttttaggttggctacaagcgtgtcaagctcagcttgtttattacggttgaggttgtaatttagagctgttttagctgcgtcaagggcctcaagactttctttactatatccttctaagtttgtaggaattttagctaattcttcgcggagagcattataattagcacgaaagtagtctttgttgtggtctgcaaaggcagtcatgagttcaaagatttcctcttccttgtattcagcgcttggtctatctgcccagattgaaagcatacttccgactgttggaagatctacttcaggatatttggtagaagctagttgattgaatggtgtttttccagtattctcaatagctttcttgaggaaaccaccaccatcttctggtttttgaccaagaatgtagtaccagtcaccgttggtattcaagaatttatagcctttgcttgctaggtattgaggtgatgcgaggttatatccccaccagcctttagaccagtaagaaatcaagacatctttgtcaaactgaacatcgtccttgtcttcatagtagaagccatcgttgaaggccattggttgaagccctctttctttggccatagctgcgagggtgttggcatattcggcaaatttgccatagagttgataccacttgaggtagtaccagccttgggcactagtcgcatcgttggcgtattcgtcagtaccaaagttgaaaatctttgttttacctgcaaagaagtccatgtatttaccgatgagggcttttacaaagttcatcgcttcttcgtttttcaagtccatagttgtttttgaaactttatcaaagtgggcttgaggatttttaatacctaatttttccatggcaaccagcatagcatccatgtgacctggactgttaatagctgggatgagaccgatgtccttagatttagcgtattcaattagctctgttacttctgcctgtgttagtgcagtaccgtttggatcgtcgtagtaagctttagttccttcgataatagcttttttaacgtcatcactagcataggtttttccgttggcagtaatggtcatatcatcgagtagaaagcgaagtccgtcatttcctagaaggagatggacatcagaatatccgagctcactggccttgtctacgatgcgtttgagctggttcagagtaaagtatttgcgtccagcatcgattgagattaccttgtttttggcaagtttttcaacctcacgtttagcttcttcttctttttgagcttcaggcgtgagggtcaagttgttgacagtttcttgaagtttagcaatggcttgatcaatcgtatcttgttgggcacggctaaggttgctatcgagagagcgaatagctttttcagcttcttttacggccgtgacgctttctgcagtataacggttcaggtcttttggtacctcgttaagtgcttgctctgcagattcataatcagctgcgaagtattcagcgttggcatttgcaaaatgacgcatgagtttgaagaggcgtgatggtgaataacgtgcagatggagtgtcagcccaagcagctaccataccaccgatgattgggatatcagctccttctgtttttggtacagaagtgattggtgtgtttttaataccattgagcccctgatcgagattgtaccagccttggccatcagcgtttcgtccaagaacgtagtaccaagcatcattggtattaaggatttggtgacctttttcagctagtagtttagaagaagcgacatcgtagcctccccaaccaccagtccacatagaaacgatgatgtctttgtcaaaactaccaaagcttgtgtcgctattgtagtagataccgtcgttaaaagccattggtttgagaccgtgcgattttacaatacgagcgaggtcattggcgtaggcaataaatttttcatagccttttacagggtagccttcgtttggatagtatttatcagcttgaagcacactccaacctttagcatctgtcgcatcattggcatattcatcaagtccgatgttgaagatttcagtctttttcgcgaaataagcagcatacttgtcgataagggcttttgtaaaagcgacagcttgttcgttgtcaagatcgacagtacgggctgatttcttcccaaaatagctaaagttagggttttggattcccaattctttcatggcattgagaatcgcatccatgtgtccaggactatttactgtcggaatgagaccgatacctttatctttggcatagttaatcagatctgtcatttgactttctgttaagtgattgccgtttggatcgttgtaataatcatttgtacctttttcaatggcgcgtttgacatcgtcactggcataggtcttgccgttagctgtgatgctcatatcgtccaacatgaaacggagtccatcatttccgactaataggtgtaaatcagtgtagccataatgtttcgctttatcgatgatttccttgagctgttctggtgagaaatatttacgtccagcatcaatagaaacaattttctttttcgctagtttttcatttacagttgcagcacgttcctttcctgcctctgttgccggtttgtcagcctctgctttcgcttcatcttttttagctggtttatccttgtcagtcttgtctgtatttgactctttagaatcaacctctttcgcttcttcctttttagggctagcttcttctgcctttttattagcagtttctttttcagcagaagttggagttaccacttctgctttatcactaggagttgaactaacttcctcttgtggtttttcttctgtttttggaagactagctaccttatcagtagctggagtttctgtttctacagtttttggagcttctggttgaagcactgctttaggtgtttcctcagtccgattttcggatgattgaggggaatcagaaaccgtatggatggtcggttggttttctgtagtagtaggagtaactccatcggctgcaacagtctgtgcttggaaggcaaatccaattagaacagaagctgctcctacagcgtatttacgaatagaaaaacgctgttgtttttcatgtttcattgcaaaacctcctgattgcattgttatattgatagcgattatataaatcaacgcctttattttatttcttatattaatttcttatattaacgagagtcaagaggagatgacaaaaaactataataagtataaaaaaatataaaatttaaacttaagatttcagattggtcggaaaaaatacgtatatatatctagtataatttttggttctatttctataaaatattccacaaattatagaattttccaaaaataggtaagcgctacctttttggtgtagtataataagcatagaaaaagcccaagcgattagctcaggttttcttcttagtgatcacggtcacatgagataaatttaatcttgtagtaatcagatcgtttgtaagtttcactgtattctaaaacttggccagttgattcgagtttggtgattttagtttgtaggacagtagggaattgttcatcgactccgaggactgaagctgcatgttctggagttggaaagactatttcgttgatttcttcaaagtgttcatcattcatgtgaatgtggtagtctaacttgaaacgattatagatagaactatagtattcaaggtttggataatttgcgttgatatattgttctgggatgtaggatgtatggtagatataaacgacaccgtttgattcgcggatacgttcaatcttgtagtagaattgatcgccgcgtagacccaatttttccaagtaaacaagcttgtttccgcgttcaattgaaagaacagttaccttatcatctttagcattgaagagttcaatatctgaaaactctacaagcttgtgtttgcgtgcacgtgaaacgaaggttccttttccttgttggcggacaatatagccatctttggcaaggtcgtttaaggcgcgaacaactgtgatagagctgacatcgtacattgaaatgagttctgcttcagtgtaaaatttatctccactgctaaactgcccagagatgattttattttttaattcgtcttttatgtattgatatttgggaattgccatatttttacctctattttccttcttccatagaaaattttaccataaaagcgaaaaaaatagtagtcttttgaataaaaaattagaataatagtttgaaaaattaagcgatatagggattgctcatattttataaatgtattctatacaaaattattttaggtcctatattccgaatttaaagagcgtttgaaatgggtctaaaaatgtttgaaactaattgaatgtgtgtataatagtaaaaatgcagtaaatatcccgacaatttctattgacaattcaaacagattggtttataattaatataacaacaaatgaaagcgcaaactttcgcggtcggaaggtagttttatgacacgatttgagatacgagatgatttctatctcgatggaaaatcatttaagattttatctggtgccattcattattttagggttcctccagaggattggtatcattcgctctataacttgaaggctcttggttttaatacggtagagacttatgttgcttggaatttacacgagccttgtgaaggtgagtttcattttgaaggtgatctggatttagagaaatttctccaaatagcgcaggatttgggtctctacgcaattgtgcgtccgtctccatttatctgtgcggaatgggaattcggtggcttaccagcttggctcttgaccaagaacatgcgaattcgctcatccgacccagcatatatcgaggcagttggtcgctactatgatcagttattgccaagactggtgcctcgtttgttggacaatggtggcaatattctcatgatgcaggttgaaaatgagtatggttcttacggagaagataaggcttacctgagagcgattcgacagctaatggaagagtgtggcgtaacctgtcccctctttacatcagatggtccatggcgagctactctgaaagctggaaccttaattgaagaggacctctttgtaacaggaaactttggttctaaggcaccttacaacttttcgcagatgcaggaattctttgatgaacatggtaagaaatggccactcatgtgtatggagttctgggatggttggttcaatcgctggaaagaaccgattatcacacgggatcctaaggaattggcagatgcagttcgagaggttttggaacaaggctctatcaatctttacatgttccacggtggtacaaactttggtttcatgaatggttgctcagctcgaggaactttggacctgccacaagttacgtcttatgattacgatgcccttctggatgaagaaggaaatccaactgctaaatatcttgcagtcaagaagatgatggcaacacatttttcagagtatccgcagttggaaccactctacaaagagagtatggagttggatgctattccactagttgaaaaagtttctttgtttgaaaccttagatagcttgtcaagtcctgtagaaagtctctatcctcaaaagatggaggagctgggacaaagttatggctacctactttatcgaacagaaacaaactgggatgcagaagaagaaagacttcgtatcattgatggtcgagatagggcccagctgtatgtcgatggtcagtgggttaaaactcaatatcagacagagattggggaagatattttttatcaaggtaaaaagaaagggctatctaggttagatatcttgatagaaaatatggggcgtgtcaactatgggcataagttcttagcggatacgcaacgtaagggaattcggacaggggtctgtaaggatctgcatttcttactaaactggaaacactatccactcccactagacaatcctgagaaaattgatttttcaaaaggatggactcaaggacaaccagccttttacgcttatgactttacagtcgaagagccaaaagatacttacctagacttgtctgagtttggtaagggggttgcctttgtcaatgggcagaatctaggacgtttttggaacgttggcccaactctctcactttatatccctcatagctatctcaaggaaggtgccaaccgcatcattatctttgaaacagaaggtcaatataaagaagagattcatttaactcgtaaacctacactaaaacatataaagggggaaaacttatgacaattgtaggatgccgtattgatggacgtttgatccacggacaagtagccaatctttgggctggaaaactaaatgtttcacgcattatggttgtagacgacgaagttgtcaacaacgatattgaaaagagtggtttgaaacttgcgacaccaccaggtgtgaaattgagtattttgccagttgagaaagctgcagccaatattcttggtggcaaatacgatagccaacgtctctttatcgtggctcgtaaaccagaccgcttccttggtttggtagaagcaggtgtaccacttgaaacccttaatgttgggaatatgtctcaaacaccagaaactcgttctattacacgttctatcaacgtagtagacaaggatgtggaagacttccacaaactggcagaaaaaggtgttaaacttactgctcagatggttccaaatgatccaatttcagactttttgagcttattaaaataggaaaaaaatttttaggaggtcattgttatgatacaatggtggcaaattttacttctcactttgtactcagcttatcaaatctgtgatgagttgacgatcgtttcatctgcaggttcccctgtatttgctggtttcattactggtttaatcatgggagatgtgactactggtttacttatcggtggtaacttgcaactgttcgttcttggggttggtaccttcggtggtgcttctcgtatcgacgcaacttctggtgcggttcttgcgacagccttctctgtttcacaaggaattgatgcaccgcttgccattactacaatcgctgtaccagtagcagctctcttgacttacttcgacgttcttggtcgtatgactactaccttcttcgctcaccgtgtggatgctgcaatcgaacgctttgactataaaggtattgaacgcaactacttgcttggtgcgattccgtgggctctatctcgtgcccttccagtcttctttgcccttgcttttggtggtgcctttgtacaatcagtagtagacttcgttgaagcctacaaatgggttgcagatggcttgacacttgcaggacgtatgcttccaggtcttggatttgcaatcttgcttcgttaccttccagttaaacgtaaccttcactaccttgctatgggatttggtttgacagctatgttgactgttctttactcatatgtaacaggtcttggtggcgctgttgctggtatcgtaggtactcttcctgctgaagttgctgaaaaaattggtttcgtgaacaacttcaaaggtttgtctatgattggtatttctatcgtaggtattttccttgcagtgcttcacttcaaaaatagccaaaaagtagctgtagcagcaccttctacaccatcagaaagtggggaaatcgaagatgacgaattctaattacaaacttacaaaagaagattttaatcaaatcaacaaacgtagcttgtttactttccaattaggttggaactacgaacgtatgcaagcttctggttacctttacatgatcttgcctcagttgcgtaaaatgtatggtgatggaactcctgaattgaaagaaatgatgaaagttcatactcaattcttcaatacttcaccattcttccataccattatcgctggttttgaccttgccatggaagaaaaagatggtgtaggttcaaaagacgccgttaacggtatcaagacaggtttgatgggaccattcgctcctcttggggatacaatctttggttcacttgtacctgctatcatggggtcagtcgcagcaactatggctatcgctggccaaccttgggggatcttcctttggattgcagttgcagtagcgtatgacatcttccgttggaaacagttggaatttgcttacaaagaaggggttaaccttatcaacaacatgcaaagtaccttgacagctttgattgacgctgcatctgtacttggtgtcttcatgatgggtgctcttgtagcaacagtgattaactttgaaatttcttacaagttgccaatcggtgaaaagatgattgatttccaagacatcttgaaccaaatcttcccacgtttgcttccagcaatctttactgcctttatcttctggttgcttggtaagaaaggtatgaactctactaaagctatcggtattattatcgtacttgctttggctctttctgcccttggtcactttgcacttggaatgtaattccttatgactaaatcattaattttggtgagccatggtcgcttctgtgaggagcttagaggtagcacagaaatgattatgggcccacaagacaacatttacacagtagctcttcttccagaagatggcccagaagaatttactgctaaatttgaagctgttattgaaggattggatgatttcctagtctttgcggatcttctcggtgggacaccttgtaatgtggtgagtcgcttgatcatggaaggtcgtgatattgacctttacgcagggatgaatcttccaatggtgattgaatttatcaatgcgagccttacaggcgcagatgcggactacaagagccgtgctgcagaaagcattgtgaaagttaatgacctgttagcgggcttcgatgatgacgaagatgaataatactcttcgaaaatctcttcaaactacgtcaacgtcgccttgccgtaggtatatgttactgacttcgtcagtcttatccggcaacctcaaaacggtgttttgagctgacttcgtcagtcttatccggcaacctcaaagcagtgctttgagcagcctgcggctagtttcctacagattttagttggaactcgattcaattcatgtgacaacgtgaaaatcgttagagcattttatatagaatatacatgggaatgtagcttactcccattcccatatttaatagaaaaagaggaactcaatgctacattatacaaaagaagacttgctcgaattgggtgcagaaatcactacgcgtgaaatctaccaacagcctgatgtatggagagaagcttttgaattttatcaagcaaaacgtgaagaaattgcagccttcctacaagaaatcgctgataaacatgactatattaaggttatcttgacaggtgctgggacttctgcttatgtgggagataccttgctaccttattttaaggaagtctatgacgaacgcaaatggaatttcaatgctattgcgacaacagatatcgttgccaatccagcaacctatttgaaaaaagatgtggcaactgtccttgtgtcttttgctcgtagtgggaattcgcctgaaagtttggcgactgttgatttggccaaatccttggtggatgagctttatcaagtgacgattacttgtgcagcagatggtaaattggctcttcaagctcacggtgatgatcgtaatctcttgctcttgcaaccagctgtctctaatgatgctggatttgccatgacttctagctttacgtctatgatgttgacaactctcttggtctttgatcctacagaatttgctgttaagtctgaacgttttgaagttgtatctagtcttgcccgtaaagttttagacaaggcagaagatgtcaaagagctcgttgatttagactttaaccgtgtcatctatctaggcgctggtcctttctttggacttgctcatgaagctcagctcaagattttggaattaactgctggtcaagttgcgaccatgtatgaaagcccagttggcttccgtcacggtccaaaatctcttatcaacgacaatacagttgttttggtctttggtacaacgacagactacactcgtaagtacgacttggacttggttcgtgaagttgctggtgaccagattgctcgtcgtgttgtgcttttgagtgatcaagcttttggtcttgaaaatgtcaaagaagtggcccttggttgtggcggtgtcttgaatgatatttaccgtgtcttcccttacatcgtttatgcccaactctttgctttattgacttcactcaaggtagaaaataaaccagatacaccgtctcctacaggtacagtaaaccgtgtagtacaaggtgtcataattcacgaatatcaaaagtaagacagtgtttatgaattcttgacaagaggatttgtaaattatcagataaaccatagattgtcagtacgctttctatggtttgtttgcttgagagaaatagtaaaaggagaacagaatgaaagcatacacagagcgtgtatttggaaatgttgagggtgaggatgtcttggcctatcgatttgagacagacggtggctaccaacttgaggttatgacttatggtgcgactatcttgcgctatgtcgcacctgacaaggctggaaattttgccaatgttatcttgggatttgatgactttgatagttatgtaggcaatagtcccaagcatggagcaagtgtaggtcctgtagcgggtcgtattgcaggtgcgacctttgagctcaatggtaagacctatgaccttgaggttaataatgctagcaactgtaatcacagtggttcaactggttgggattccagcttgtttgaagttgaagaagtaagcgatcatggcttgactctctacacagagcgtacagatgggacaggagggttccctggaaatctcaagatttggatcagttatcacttggaagaaactggtgcctatgaaatcagctacaaggtaacgaccgatcaggatacgctggtcaatccaaccaaccacagctatttcaacttgtctggtgatttcacgcagacgattgaccgtcatgtcttccaactaaacacagagggcatttactcaatcgctcctgacggtgttcctgccaaaactccagaagccaaccgtgatgtggtcaaacacgtctacaatggtaccttgttgaaggatatctttgcagaagaagatgagcaaatccagctggcatcaggtttggatcatccatttgcccttcctgcaggccatgacaatgctggattcctttatgaccaaaattcaggtcgcttcctgcttttcaagacagaagctccttgctttgtggtctacacagcaaactttgtggatgaaagtgtcatcataggaggtcagccaatgctacagcacaatgggattgctcttgaagcgcaagctttaccagatgccattcacagtgaccttaaaggccaagtcattcttaaagctggtcaaaccttcaccagtaagacacgttatgaacttgttgtgaagtaaaagagtcattgcgcctacttttgggagctaggaataggtacgcagagacaaatagtaggaaaatatgatataactaagcgttgaaagctatctgttaatataatattcaaactacaataaggagtaagaaagaaacgaagaaaattgtatttgctagtgccttggctttgaccttggctggagcagttttgacaaatgatgtttttgcgaacgacagacttgtggcaacacaaactactgatggtaaaaatgaaaatgtattgacctcagaggtgctaaaaccttctagtggcaatgttttggttggaatcaaaggagaatttgtggctcctcatcaacaatctattttggatgccatcaatgctatctgtaaagaagcggctgacgaaggtttggtagataagtatgtccctatcaaatgatcaactgacctagaaaaggcagcttttgccagagctacagaagcatctataaccatggatcatacccgtctttctagcaaagatctttggagtgcctttccaacttctaatagtataatgggagaaaatttggcatggaatcatgacggttttctaaaagctattgaacaatggcgtgctgaaaaagcagattatgtggagaaaaaaatagtggttcagacaacgggaaatctggtcactatgagtcgctaattaaccctaaatttacacacatggggatggcagcttttaaaaatcctaacaatcaatacaaagctattacaattgctcaaactctaggtgatgatgcttcttcagaggaattggctggtagatatggttctgctgttcagtgtacagaagtgactgcctcaaacctttcaacagttaaaactaaagctacggttgtagaaaaaccactgaaagattttagagcgtctacgtctgatcagtctggttgggtggaatctaatggtaaatggtatttctatgagtctggtgatgtgaagacaggttgggtgaaaacagatggtaaatggtactatttgaatgacttaggtgtcatgcagactggatttgtaaaattttctggtagctggtattacttgagcaattcaggtgctatgtttacaggctggggaacagatggtagcagatggttctactttgacggctcaggagctatgaagacaggctggtacaaggaaaatggcacttggtattaccttgacgaagcaggtatcatgaagacaggttggtttaaagtcggaccacactggtactatgcctacggttcaggagctttggctgtgagcacaacaacaccagatggttaccgtgtaaatggtaatggtgaatgggtaaactaggctcaggccataggtaaagcattcatcttacttagcaaaaagaatgaacgataagaaagaggttgatggcgaacattggcctcttttgatttataaagattggattcttgtcgcctcaatttcagacttttctattgtaagctaatattttatagcccattaaaagcataagcggtaatctaatttaaaaaatgctgtaattagtctgaagtccacacttacttgttgagatgttatctctgttttttatcgttataatttactgtattttttatagtatgcagaatatttttaagtatatttcaatagaaatttctatcgatttattgtataatgataagtaattgttgaaaagtactcagaaaattccatactatattatttttatgtttatacttttatgctataaaatatagattgatataaagaatatagaaaaagcgaggttaatatgagccgaaaaagcattggtgagaaacgccatagtttctcgatgagaaagttgtcagtgggattggtatcagttactgtatctagtttctttttgatgagtcaagggattcaatcggtatcggccgataatatggaaagtccaattcattataagtatatgaccgagggtaaattgacagacgaggaaaaatccttgctggtagaggcccttccacaactggctgaagaatcagatgatacttattacttggtttatagatctcaacagtttttaccgaatacaggttttaacccaactgttggtactttcctttttactgcaggattgagcttgttagttttattggtttctaaaagggaaaatggaaagaaacgacttgttcattttctgctgttgactagcatgggagttcaattgttgccggccagtgcttttgggttgaccagccagattttatctgcctataatagtcagctttctatcggagtcggggaacatttaccagagcctctgaaaatcgaaggttatcaatatattggttatatcaaaactaagaaacaggataatacagagctttcaaggacagttgatgggaaatactctgctcaaagagatagtcaaccaaactctacaaaaacatcagatgtagttcattcagctgatttagaatggaaccaaggacaggggaaggttagtttacaaggtgaagcatcaggggatgatggactttcagaaaaatcttctatagcagcagacaatctatcttctaatgattcattcgcaagtcaagttgagcagaatccggatcacaaaggagaatctgtagttcgaccaacagtgccagaacaaggaaatcctgtgtctgctacaacggtgcagagtgcggaagaggaagtattggcgacgacaaatgatcgaccagagtataaacttccattggaaaccaaaggcacgcaagaacccggtcatgagggtgaagccgcagtccgtgaagacttaccagtctacactaagccactagaaaccaaaggtacacaaggacccggacatgaaggtgaagctgcagttcgcgaggaagaaccagcttacacagaaccgttagcaacgaaaggcacgcaagagccaggtcatgagggcaaagctacagtccgcgaagagactctagagtacacggaaccggtagcgacaaaaggcacacaagaacccgaacatgagggcgaagcggcagtagaagaagaacttccggctttagaggtcactacacgaaatagaacggaaatccagaatattccttatacaacagaagaaattcaggatccaacacttctgaaaaatcgtcgtaagattgaacgacaagggcaagcagggacacgtacaattcaatatgaagactacatcgtaaatggtaatgtcgtagaaactaaagaagtgtcacgaactgaagtagctccggtcaacgaagtcgttaaagtaggaacacttgtgaaagttaaacctacagtagaaattacaaacttaacaaaagttgagaacaaaaaatctataactgtaagttataacttaatagacactacctcagcatatgtttctgcaaaaacgcaagttttccatggagacaagctagttaaagaggtggatatagaaaatcctgccaaagagcaagtaatatcaggtttagattactacacaccgtatacagttaaaacacacctaacttataatttgggtgaaaataatgaggaaaatactgaaacatcaactcaagatttccaattagagtataagaaaatagagattaaagatattgattcagtagaattatacggtaaagaaaatgatcgttatcgtagatatttaagtctaagtgaagcgccgactgatacggctaaatactttgtaaaagtgaaatcagatcgcttcaaagaaatgtacctacctgtaaaatctattacagaaaatacggatggaacgtataaagtgacggtagccgttgatcaacttgtcgaagaaggtacagacggttacaaagatgattacacatttactgtagctaaatctaaagcagagcaaccaggagtttacacatcctttaaacagctggtaacagccatgcaaagcaatctgtctggtgtctatacattggcttcagatatgaccgcagatgaggtgagcttaggcgataagcagacaagttatctcacaggtgcatttacagggagcttgatcggttctgatggaacaaaatcgtatgccatttatgatttgaagaaaccattatttgatacattaaatggtgctacagttagagatttggatattaaaactgtttctgctgatagtaaagaaaatgtcgcagcgctggcgaaggcagcgaatagcgcgaatattaataatgttgcagtagaaggaaaaatctcaggtgcgaaatctgttgcgggattagtagcgagcgcaacaaatacagtgatagaaaacagctcgtttacagggaaacttatcgcaaatcaccaggacagtaataaaaatgatactggaggaatagtaggtaatataacaggaaatagttcgagagttaataaagttagggtagatgccttaatctctactaatgcacgcaataataaccaaacagctggagggatagtaggtagattagaaaatggtgcattgatatctaattcggttgctactggagaaatacgaaatggtcaaggatattctagagtcggaggaatagtaggatctacgtggcaaaacggtcgagtaaataatgttgtgagtaacgtagatgttggagatggttatgttatcaccggtgatcaatacgcagcagcagatgtgaaaaatgcaagtacatcagttgataatagaaaagcagacagattcgctacaaaattatcaaaagaccaaatagacgcgaaagttgctgattatggaatcacagtaactcttgatgatactgggcaagatttaaaacgtaatctaagagaagttgattatacaagactaaataaagcagaagctgaaagaaaagtagcttatagcaacatagaaaaactgatgccattctacaataaagacctagtagttcactatggtaacaaagtagcgacaacagataaactttacactacagaattgttagatgttgtgccgatgaaagatgatgaagtagtaacggatattaataataagaaaaattcaataaataaagttatgttacatttcaaagataatacagtagaatacctagatgtaacattcaaagaaaacttcataaacagtcaagtaatcgaatacaatgttacaggaaaagaatatatattcacaccagaagcatttgtttcagactatacagcgataacgaataacgtactaagcgacttgcaaaatgtaacacttaactcagaagctactaaaaaagtactaggagcagcgaatgatgcagccttagataacctatacttagatagacaatttgaagaagttaaagctaatatagcagaacacctaagaaaagtattagcgatggataaatcaatcaatactacaggagacggtgtagttgaatacgtaagtgagaaaatcaaaaataacaaagaagcatttatgctaggtcttacttatatgaaccgttggtacgatattaattatggtaaaatgaatacaaaagatttatctacgtacaagtttgactttaacggaaataatgagacttcaacgttggatactattgtcgcattaggaaatagtggactagataacctgagagcttcaaatactgtaggtttatatgcgaataaacttgcatcggtaaaaggagaagattcagtctttgacttcgtagaagcgtatagaaaactgttcttaccaaacaaaacaaataacgagtggtttaaagaaaatacaaaggcatatatagtcgaaatgaagtctgatattgcagaagtacgagaaaaacaagaatcaccaacagccgatagaaaatattcattaggagtttacgatagaatatcagcaccaagttgggggcataagagtatgttattaccactactaactttacctgaagaatctgtgtatatttcatcgaatatgtctacacttgcattcggttcgtatgaaagatatcgtgatagtgtggatggagttattctttcaggagatgctttacgaacttatgtaagaaatagagttgatatagcagcgaaaaggcatagagaccattatgatatttggtacaatcttcttgacagtgcttcaaaagaaaaacttttccgttctgtgatagtttatgatggattcaatgtaaaagatgagacaggaagaacttattgggcaaggttaacggataaaaacatcggctctattaaagaattcttcggacctgttgggaaatggtatgagtataatagtagtgcaggagcgtatgcgaatggaagtttaacgcactttgtgttagatagattattagatgcttatggaacgtcggtttatactcatgaaatggttcataattctgattctgcaatctactttgaaggaaatggtagacgtgaaggattgggagcggagttatacgcacttggtttactgcaatctgtagatagtgtaaattctcatattttagctttaaatacgttatataaagcagaaaaagatgatttgaatagattgcatacatataatccggtggaacgtttcgattcggatgaggcgcttcaaagttatatgcatggatcatatgatgtaatgtatacacttgatgcgatggaagcaaaagcgatattagctcaaaataatgatgttaagaaaaaatggtttagaaaaatagaaaattattacgttcgtgatactagacataataaagatacacatgcaggaaataaagtccgtccattaacagatgaagaagtagctaacttaacatcgttaaactcattaatcgacaacgacatcataaatagacgtagctatgatgatagtagagaatataaacgaaatggctactatactataagtatgttctctcctgtatacgcagcgctaagcaattcgaaaggtgctcctggagatattatgtttagaaaaatagcttatgaattacttgcggaaaaaggttatcacaaaggattcctaccttatgtttctaatcagtacggagcagaagcatttgccagcggaagcaaaacattctcatcatggcatggaagagatgttgctttagtgacagatgatttagtatttaagaaagtattcaatggtgagtactcatcatgggctgatttcaaaaaagcaatgtttaaacaacgtatagataaacaagataatctgaaaccaataacaattcaatacgaattaggtaatcctaatagtacaaaagaagtaactataacaacggctgcacaaatgcaacaattaattaatgaagcggctgcgaaagatattactaatatagatcgtgcaacgagtcataccccagcaagttgggtgcatttattaaaacaaaaaatctataatgcatatcttcgcactacagatgactttagaaattctatatataaataagattgtagagtttcattgttgagtagtgtttcttgtaaggatgaggagtcagatgacaaatcgactcctttttcttatggatcgatgtagagatttgattgaatgcagattgcaggaatcatcttcaactcatcaacgaccaatggtgacaaggtggatttcaatcccacagaaaatgttgatttgagaaataactttgctagtctagtaaaataaatacaaaacaatcctagaagattttttctgggattgttttttgctgagtgggatgcttcaagttgtctggcttgactttcttgagggaagttatataatagttgtaataattaaagttacaataaaagaggaaatatttatgacatatgaataccagagccacatttatttagcagaggcagttttaaatgtgaaggatttggtcagtcaaacagttttttatcagcagattattggtttagaaatcctatctcaaacggatacagaggtcgttctgggacttggaggaaaagccttggtacacttgattcaagcacaagagggtggagaagtaagggaacattatggtctttaccatctggctattcttttgccgacacgaaaggctttggcggatgtcttgaagcacctgacggatttacagattcctcttgttggcggtgcagatcacggttacagtgaggccctttacttagaggacttggagggaaatggcattgaactctatcgagataagccagtttccacatgggatattcgagaagatggacgtattatcggggtgactgaagtccttgcggctcaggatatctatgagttgggggaaagagtagagccttttatcctagcagagggtacgagaatggggcatattcatctttctgtcaaggatagtcgaaagtccagacagttttatcaaacggtgttagggctcgaggataaattcagtgtgcctagtgctagttggatcgcagctggggactaccatcatcatttagcagtcaacgaatggggaggaaaaggtctggatccgcgtaaacaagtcctaccaggtttagcctactatgtcatcgaagtcgcacataaagaagaactgttaacgattgcccaacgagcacaagaagttgacgcaccaatcaaatggatgacatcgatccaattggaaatcacagactcagatggcatcgtgacccgtattcgtttagctagatagatggtatgtgatgaaggtagagcatcaattgtagaaagtgctccttattctagtcagatacgtggaaaatttgatatgatagtagggaataaggagaagaataatatgactagcgaataccagaaaatgatagcaggagagttttaccgtccatcagacccagaactgagagccttagctcaggcttctcgccaaaaacaggccgcctttaacaaggaagagaaccccttgaagggagccgaaatcatcaagacttggtttgcctcaaccgggaaaaatctttacatcaacactcgcttgatggtggactacggtgtcaacatccatctaggggaaaatttttattctaattggaacttgaccatgctggatatctgtcccattcgtatcggggacaatgctatgattggtcctaattgtcagtttttgacacccctccatccactagatccacaggaacgcaattcaggtatcgagtacggaaagcctatcacaatcggagataatttctggactggtggtggcgtcattgtccttcctggagtgacactgggaaataatgtcgttgcaggagcaggggcagtaattaccaaatcttttggcgacaacgttgtcctagctggcaatcctgcgcgcgtgattaaggaaatacctgttaaatagaagtaaaaaggaacagctggggttgtttcttttttgtaggtttcatcattttttacccagttcacatttacctactctatctcttagcaagtctgtttcattaagcaagttcaaagcatctcgtaagtgggatgtttttctcctcagttcatcagcttcctccttgacactcggtcagattttgatacaatagtacaaaattagaggaggcaggctatgattcagaaacatgcgattcctattttagagtttgatgacaatcctcaggcggttatcatgcccaatcacgaggggctggacttgcagttgccaaagaagtgtgtttatgcatttttaggtgaggagattgaccgctatgcgagggaagtaggggcgaactgtgttggcgaatttgtttctgccaccaagacctatccagtttatgtcgtgaactacaaggacgaggaggtctgtctggctcaggctcctgttggctccgctccagcagcccagtttatggattggttgattggctatggtgtggagcagattatctctactgggacctgtggtgtcctagctgatatagaggaaaatgcctttctagtccctgttcgcgctctgcgagatgaaggagccagttaccactatgtggcaccttgtcgttatatggaaatgcagccagaggctattgctgctattgaggaagttttggaagacagagggattccttatgaagaagtcatgacctggacgacagacggtttttaccgagaaacggctgaaaaggtggcttatcgtaaggaagaaggctgtgctgttgtggagatggagtgttctgctcttgcggcagtagctcaattgcgtggggttctctggggtgaattgttgttcacagcagattctctagcggacttggaccagtacgacagtcgtgactggggctcggaagcttttaataaggcgctagaactgagtttagcaagtgttcaccacctttagttgtactggcaaaggatttgttttatcataaaatgtctagctcatacttttcaaaaatatgtttaaacgaggtcaccttcctcttgtcctaggcatgttgaggttgggaaaaatctttaaaatcagaaaaacgtatcatatcaggtgatgaaaactttgacactatgcgttttatgtcgataagatttagagtgagatgaaatgatactcttcgaaaatctcttcaaaccaggtcagcttcaccttgccgtaggtatatgttactgacttcgtcagtcttatccggcaacctcaaaacggtgttttgagctgacttcgtcagttctatttgcaacctcaaaacagtgttttgagcaacctgtgactagctttctaatcgatgccttggttttcattgcctataatcaaaaagagaaattttctcctgaaaagcatatagagtagctggcgttaaaagctcctgtcttgcttttttgacctatagtcacatctatcaagtattgttcttgcctaagctatcaataaaaaggtggcattttttaggcttggtgttagtagattttgccttatcctatctaagtcatttcgaactttttatggtacaatggaaacatgttattcaaattatctaaggaaaaaatagagctaggcttatctcgtttatcgccagcccgtcgtatttttttgagttttgccttggtcattttactaggctctcttcttttgagcttgccctttgtccaagttgaaagctcacgagcgacttattttgatcatcttttcactgctgtctctgcagtctgtgtgacgggtctctcaacccttccagtagctcacacctataatatctggggtcaaataatctgtttgctcttgattcagatcggtggtctagggctcatgacctttattggggttttctatatccagagcaagcaaaagcttagtcttcgtagccgtgcaactattcaggatagttttagttatggagaaactcgatctttgagaaagtttgtctattctatttttctcacgacctttttggttgagagcttgggagctattttgcttagttttcgccttattcctcaacttggctggggacgtggtctttttagttccatttttctagcgatctcagccttctgtaatgccggttttgataatttagggagcaccagtttatttgcttttcagaccgatttactggtcaatctggtgattgcaggcttgattattacaggcggccttggttttatggtctggtttgatttggctggtcatgtaggaagaaagaaaaaaggacgtctgcactttcatacgaagcttgtactattattgactataggtttgttgttatttggaacagcaactactctctttcttgagtggaacaatgctggaacgattggcaatctccctgttgccgataaggttttagttagcttttttcaaacagtgacgatgcgaacagctggcttttctacgatagattatactcaggctcatcctgtgactcttttgatttatatcttacagatgtttctaggtggggcacctggaggaacagctgggggactcaagattacgacattttttgtcctcttggtctttgcacgaagtgagcttctaggcttgcctcatgccaatgttgcgagacgaacgatcgcgccgcgaacggttcaaaaatcctttagtgtctttattatctttttgatgagcttcttgataggattgattctgctagggataacagccaaaggcaatcctccctttatccacctcgtatttgaaaccatttcagctcttagtacagttggtgtaacggcaaatctgactcctgaccttgggaaattggctctcagtgttatcatgccacttatgtttatgggacgaattggtcccttgaccttgtttgttagcttggcagattaccatccagaaaagaaagatatgattcactatatgaaagcagatattagtattggttaagaaaggaaagagcatgtcagatcgtacgattggaattttgggcttgggaatttttgggagcagtgtcctagctgccctagccaagcaggatatgaatattatcgctattgatgaccacgcagagcgcatcaatcagtttgagccagttttggcgcgtggagtgattggtgacatcacagatgaagaattattgagatcagcagggattgatacctgcgataccgttgtagtcgcgacaggtgaaaatctggagtcgagtgtgcttgcggttatgcactgtaagagtttgggggtaccgactgttattgctaaggtcaaaagtcagaccgctaagaaagtgctagaaaagattggagctgactcggttatctcgccagagtatgaaatggggcagtctctagcacagaccattcttttccataatagtgttgatgtctttcagttggataaaaatgtgtctatcgtggagatgaaaattcctcagtcttgggcaggtcaaagtctgagtaaattagacctccgtggcaaatacaatctgaatattttgggtttccgagagcaggaaaattccccattggatgttgaatttggaccagatgacctcttgaaagcagatacctatattttggcagtcatcaacaaccagtatttggataccctagtagcattgaattcgtaaagagggatgacccctcttttttgatgcctaagatggcaaatagagacagaagccccttgtcttctagtaaaagttcttcaaaggctggactttatggtaaaatagaaagaagtgacaagagagagtaatactcaatgaaaatcaaagatcaaactaggaaactagctacgggctgctcaaaacactgttttgaggttgcagatagaactgacgaagtcagtaacatctatacggcaaggcgacgttgacgcggtttgaagagattttcgaagagtataagaaaaaatcagtcccctaaaggagtagattatgaagttattgtctatcgcaatttctagctataatgcagcagcctatcttcattactgtgtggagtcgctagtgattggtggtgagcaagttgggattttgattatcaatgacgggtctcaggatcagactcaggaaatcgctgagtgtttagctagcaagtatcctaatatcgttagagccatctatcaggaaaataaatgccatggcggtgcggtcaatcgtggcttggtagaggcttctgggcgctattttaaagtagttgacagtgatgactgggtggatcctcgtgcctacttgaaaattcttgaaaccttgcaggaacttgagagcaaaggtcaagaggtggatgtctttgtgaccaattttgtctatgaaaaggaagggcagtctcgtaagaagagtatgagttacgattcagtcttgcctgttcggcagatttttggctgggaccaggtcggaaatttctccaaaggccagtataccatgatgcactcgctgatttatcggacagatttgttgcgtgctagccagttctaactgcctgaacatactttttatgtcgataatctctttgtctttacgccccttcagcaggtcaagaccatgtactatctgcctgtcgatttctatcgttatttgattgggcgtgaggaccagtctgtcaatgagcaagtgatgattaagtgcattgaccagcaactcaaggtcaatcgactcttgatagaccaacttgatttgtcccaagtgagtcatcccaaaatgcgagaatatctgctgaatcatattgaactcacgacggtgatttccagtaccctgctcaaccgatctggaacagcggagcatctggcaaaaaaacgccaattgtggacctatattcagcagaaaaatccagaagtctttcaggctattcgtaagaccatgttgagccgtttgaccaaacattctgtcttgccagatcgcaaactgtccaatgtcgtctatcaaatcaccaaatctgtttatggatttaattaatataagtgttttataagagggatttaagaaaaattttaactttttcttagtcctttttaatttcaggagattatactagagtcatcaaataaagaaagactctaaggagaatcctatgaaattcaatccaaatcaaagatatactcgttggtctattcgccgtctcagtgtcggtgttgcctcagttgttgtggctagtggcttctttgtcctagttggtcagccaagttctgtacgtgccgatgggctcaatccaaccccaggtcaagtcttacctgaagagacatcgggaacgaaagagggtgacttatcagaaaaaccaggagacaccgttctcactcaagcgaaacctgagggcgttactggaaatacgaattcacttccgacacctacagaaagaactgaagtgagcgaggaaacaagcccttctagtctggatacactttttgaaaaagatgaagaagctcaaaaaaatccagagctaacagatgtcttaaaagaaactgtagatacagctgatgtggatgggacacaagcaagtccagcagaaactactcctgaacaagtaaaaggtggagtgaaagaaaatacaaaagacagcatcgatgttcctgctgcttatcttgaaaaagctgaagggaaaggtcctttcactgccggtgtaaaccaagtaattccttatgaactattcgctggtgatggtatgttaactcgtctattactaaaagcttcggataatgctccttggtctgacaatggtactgctaaaaatcctgctttacctcctcttgaaggattaacaaaagggaaatacttctatgaagtagacttaaatggcaatactgttggtaaacaaggtcaagctttaattgatcaacttcgcgctaatggtactcaaacttataaagctactgttaaagtttacggaaataaagacggtaaagctgacttgactaatctagttgctactaaaaatgtagacatcaacatcaatggattagttgctaaagaaacagttcaaaaagccgttgcagacaacgttaaagacagtatcgatgttccagcagcctacctagaaaaagccaagggtgaaggtccattcacagcaggtgtcaaccatgtgattccatacgaactcttcgcaggtgatggcatgttgactcgtctcttgctcaaggcatctgacaaggcaccatggtcagataacggcgacgctaaaaacccagccctatctccactaggcgaaaacgtgaagaccaaaggtcaatacttctatcaagtagccttggacggaaatgtagctggcaaagaaaaacaagcgctcattgaccagttccgagcaaatggtactcaaacttacagcgctacagtcaatgtctatggtaacaaagacggtaaaccagacttggacaacatcgtagcaactaaaaaagtcactattaacataaacggtttaatttctaaagaaacagttcaaaaagccgttgcagacaacgttaaagacagtatcgatgttccagcagcctacctagaaaaagccaagggtgaaggtccattcacagcaggtgtcaaccatgtgattccatacgaactcttcgcaggtgatggtatgttgactcgtctcttgctcaaggcatctgacaaggcaccatggtcagataacggtgacgctaaaaacccagccctatctccactaggtgaaaacgtgaagaccaaaggtcaatacttctatcaattagccttggacggaaatgtagctggcaaagaaaaacaagcgctcattgaccagttccgagcaaacggtactcaaacttacagcgctacagtcaatgtctatggtaacaaagacggtaaaccagacttggacaacatcgtagcaactaaaaaagtcactattaacataaacggtttaatttctaaagaaacagttcaaaaagccgttgcagacaacgttaaggacagtatcgatgttccagcagcctacctagaaaaggccaagggtgaaggtccattcacagcaggtgtcaaccatgtgattccatacgaactcttcgcaggtgatggcatgttgactcgtctcttgctcaaggcatctgacaaggcaccatggtcagataacggcgacgctaaaaacccagctctatctccactaggtgaaaacgtgaagaccaaaggtcaatacttctatcaagtagccttggacggaaatgtagctggcaaagaaaaacaagcgctcattgaccagttccgagcaaacggtactcaaacttacagcgctacagtcaatgtctatggtaacaaagacggtaaaccagacttggacaacatcgtagcaactaaaaaagtcactattaagataaatgttaaagaaacatcagacacagcaaatggttcattatcaccttctaactctggttctggcgtgactccgatgaatcacaatcatgctacaggtactacagatagcatgcctgctgacaccatgacaagttctaccaacacgatggcaggtgaaaacatggctgcttctgctaacaagatgtctgatacgatgatgtcagaggataaagctatgctaccaaatactggtgagactcaaacatcaatggcaagtattggtttccttgggcttgcgcttgcaggtttactcggtggtctaggtttgaaaaacaaaaaagaagaaaactaatcagctaaggaaataaatgatggatagtgggctgactaagattagtttaacaactcaatcagcaatcaggactttctttcaatagcagattaaaatcatcgtaaaacaataaaaatagtgttatacttaaagcagtatagcactgtttttatcaaaggagagacagatgggaaagacaattttactcgttgacgacgaggtagaaatcacagatattcatcagagatacttaattcaggcaggttatcaggtcttggtagcccatgatggactggaagcgctagagctgttcaagaaaaaaccgattgatttgattatcacagatgtcatgatgcctcggatggatggttatgatttaatcagtgaggttcaatacttatcaccagagcagcctttcctatttattactgctaagaccagtgaacaggacaagatttacggcctgagcttgggagcagatgattttattgctaagccttttagcccacgtgagctggttttgcgtgtccacaatattttgcgccgccttcatcgtgggggcgaaacagagctgatttcccttggcaatctaaaaatgaatcatagtagtcatgaagttcaaataggagaagaaatgctggatttaactgttaaatcatttgaattgctgtggattttagctagtaatccagagcgagttttctccaagacagacctctatgaaaagatctggaaagaagactacgtggatgacaccaataccttgaatgtgcatatccatgctcttcgacaggagctggcaaaatatagtagtgaccaaactcccactattaagacagtttgggggttgggatataagatagagaaaccgagaggacaaacatgaaactaaaaagttatattttggttggatatattatttcaaccctcttaaccattttggttgttttttgggctgttcaaaaaatgctgattgcgaaaggcgagatttactttttgcttgggatgaccatcgttgccagccttgtcggtgctgggattagtctctttctcctattgccagtctttacgtcgttgggcaaactcaaggagcatgccaagcgggtagcggccaaggattttccttcaaatttggaggttcaaggtcctgtagaatttcagcaattagggcaaacttttaatgagatgtcccatgatttgcaggtaagctttgattccttggaagaaagcgaacgagaaaagggcttgatgattgcccagttgtcgcatgatattaagactcctatcacttcgatccaagcgacggtagaagggattttggatgggattatcaaggagtcggagcaagctcattatctagcaaccattggacgccagacggagaggctcaataaactggttgaggagttgaattttttgaccctaaacacagctagaaatcaggtggaaactaccagtaaagacagtatttttctggacaagctcttaattgagtgcatgagtgaatttcagtttttgattgagcaggagagaagagatgtccacttgcaggtaatcccagagtctgcccggattgagggagattatgctaagctttctcgtatcttggtgaatctggtcgataacgcttttaaatattctgctccaggaaccaagctggaagtggtggctaagctggagaaggaccagctttcaatcagtgtgaccgatgaagggcagggtattgccccagaggatttggaaaatattttcaaacgcctttatcgtgtcgaaacttcgcgtaacatgaagacaggtggtcatggattaggacttgcgattgcgcgtgaattggcccatcaattgggtggggaaatcacagtcagcagccagtacggtctaggaagtacctttaccctcgttctcaacctctctggtagtgaaaataaagcctaaaacccctttacaaatccagctattcatggtagaatagattttgtgtgaaatatcagcaggaaagcatgaagctcgtcaacaggtgtcttatgacaagtaaccttggctgtttaggcgaagggcatctgcacgaatcagggctttctaagtgactatttccaccgaaatattatttatatcaggaggacattcatatgtcacgttatacaggaccatcttggaaacaagctcgtcgtcttggcctttcacttacaggtacaggtaaagaattggcacgtcgtaactacgtaccaggacaacacggaccaaacaaccgttctaaattgtcagaatacggtttgcaattggctgaaaaacaaaaacttcgtttcacttacggtgtaggtgaaaaacaattccgtaacttgttcgtacaagctacaaaaatcaaaggcggaatcctaggtttcaactttatgcttcttttggaacgtcgtttggataacgttgtttaccgtcttggtctcgcgactactcgtcgtcaagctcgtcaattcgtaaaccacggtcacatccttgttgacgggaaacgcgttgatatcccatcataccgcgtaactccaggtcaagtgatctcagttcgtgaaaaatcattgaaagttccagcaatccttgaagcagtagaagctactcttggacgtccagcattcgtatcattcgacgctgaaaaattggaaggttcattgactcgcttgccagaacgcgacgaaatcaacccagaaatcaacgaagcacttgtcgttgaattctacaacaaaatgttgtaatattttattgaataagataggccttgatattaagcactttgggacgttctcccttagtgcttttttgatttctcttagtatccagctataatcgttgagacataactagaccgatatagtccaaagtgatatagtaaaatgaaccaaaaatagtacacaatgtggtataatccttttatggcatattcaatagattttcgtaaaaaagttctctcttattgtgagcgaacaggtagtataacagaagcatcacacgttttccaaatctcacgtaataccatttatggctggttaaagctaaaagagaaaacaggagagctaaaccaccaagtatagtgtattgaatctataacagtacaccttggctgctaaaatatttctataaattaatttgactttcctgatagagatgttcacatcttatttcaaactactataaaagttctataatctctttataagatttgcccatcagacaaaatagaacgatttgaaggcgtttatgatatttagctgtacgagagtcttttaaaagtgttttgatggtttggatttcttctttagttgatttcatatcactgttatataatactttttgattttagtctagtattagtaagcagactcaaaccttagaaaatcttttgagatcattgacaggtgtatcgaatcctaccacagattcagcacgtctggttttggcagaggctaataaagcttttgcagatgatagtttgacagagcaaggtttacgtgatatcttgcaaacagtcaaagatgccattgcttccctagagtccattaaggaaagccagtcagcaactaaggatggaggacaaacagcgggcaaagaaacagcaggagaagatgagtctgcaaatcaaactcaagaaattagccaaggaattaagtaaacttcttaaagactcaaaccttgaaacagtagataaggatgtccttgaaaactctcaaaaagaacttcaaaaagcagttttgttcttggcagatgaaaaaggctctgagcatactgcagcagagttgattgataatcttaaagaggttattgctaagttgaaagcaaacgcctaataacatattaaaaatctccagattaggaactatcgctgagttccctagtctggagatttttcagtataccccgttgttggatgcttataacagagtgacgccatcactgggctaatagagataaaataaacaattgatttaggacatttgtttgatagtggtgataaagttttaaatctgctacataatttgtggagttttttctataattaggagtttaacctaacctgcaaataggagtatactaataatgtaatcgttatcaaaagtctaaaaaagaatttttagatggatatcaaaataaaaagggaggaaattatgaaaaagttttcaaaaacattgagagacaactggatctttctcttgatggttttgccaggggcactctggttgattctattcttttacattccagtatttgggaacgtggttgccttcaaagactaccacatgaccagtaatggtttcatagatagtatcataaatagtaaatgggtcggactcgataattttagattcttatttagttcaagagacgcctttattatcacacgaaatactgtcctctacaatcttggctttatctttctaggtttagttgtatctgtagggattgccattatcctcagcgagctccgttctaagagaatggtgaagatttttcaaacttctatgttgttcccttacttcttgtcttgggttatcatcagtttctttacagatgccttcctaaatattgataaaggggtgttcaatcatctattggaaagtcttggtctcaaagaagtcaatttctacgctgacctgggcatctggccctatctcctacttttcctaggtatttggaaaggctttggatatagcagtgtcatgtactatgcgacgatcatgggaattgatccaacctactacgaagcagcgacagtggacggagctagcaagtggcaacgtattcgcaacgtaaccattcctcagttgactccgcttgtaactgtattgaccatccttgcagtcggaaatatcttccgcgcagacttcggtctcttctatcaaatcccacacaatgctggtcagctttacaatgtaaccaacgttttggacgtatatgtctttaatggtttgactcagacagcagatatcggtatggctgcagcagccggtctttaccaatccgttgttggtttgattctggttatcctatcaaacttgcttgcaagacgagtcgatccaaactcagctttgttctagaaaggaggagaatatggcaaaaaagaaaattaaaaaagaaaaaattgataatgtcggcattcactccttcagtaagaaagcagatatcttcttcagtatcatttcgggtttgattgccctctcttgtatcctaccttttgtattcgttatcattatttcagtgacagacgagaaaagcctcctccaatacggctatagcttcttcccatcccaatttggcttagacggttttgagtttttggcacagtttaaggataaaatcctacaagccctcttcatctctgtctttgtaaccgtagttgggacattgacaaatgtctttatcacaacaacctatgcctacgctatttcacggacaacctttaagtatcgcagattctttaccatcttcgtccttctcagtatgttgttcaacgctggtttggtaccaggttatatcatggtgacccgtgtacttcagcttggtgacactgtttgggccttgattgttccaatgcttctctcaccatttaacatcatcttgatgcgttccttcttcaagaagaccattccagaagccattctagaatcggctcgtatcgatggtgccagtgaggcccggattttcttccaaatctgtttgccattgtcactaccaggtatcgcaaccatcacgctcttaacagctcttggtttctggaatgactggttcaacgcccttctttacatcaagagtgacaacttgtatccattgcaatatttgctcatgcaaatccaacaaaatatggactacattgccaaagcggtcggcttgattggtcaactgggagttgctctaccgaaagaaacaggtcgtatggccatggttgtggttgcaacccttccaatcgcgattttgtatccatttttccaacgctactttgtaaaaggtttgactatcggtggtgtgaaagaatagtgcttattgagaaataacatttctcagttcccaacttcccttgtgtgaagttaatactcttcgaaaatcaaattcaaaccgcgtcaacgtcgccttgccgtagatatatgtaactgacttcgtcagtcttatctacaacctcaaagcagtgctttgagcagcctgcggctagttttctagtttgctctttgatttttattgagtataagatcattacattgtttataagtttaaaaataaaaaaaggagtttttatcatgaaaaactggaaaaaatatgcttttgcatctgctagtgtagtcgctctggctgcaggtcttgctgcttgtggaaatttgacaggtaacagcaaaaaagctgctgattcaggtgacaaacctgttatcaaaatgtaccaaatcggtgacaaaccagacaacttggatgaattgttagcaaatgccaacaaaatcattgaagaaaaagttggtgccaaattggatatccaataccttggctggggtgactatggtaagaaaatgtcagttatcacatcatctggtgaaaactatgatattgcctttgcagataactatattgtaaatgctcaaaaaggtgcttacgctgacttgacagaattgtacaaaaaagaaggtaaagacctttacaaagcacttgacccagcttacatcaagggtaatactgtaaatggtaagatttacgctgttccagttgcagccaacgttgcatcatctcaaaactttgccttcaacggaactctccttgctaaatatggtatcgatatttcaggtgttacttcttacgaaactcttgagccagtcttgaaacaaatcaaagaaaaagctccagacgtagtaccatttgctattggtaaagttttcatcccatctgataattttgactacccagtagcaaacggtcttccattcgttatcgaccttgaaggcgatactactaaagttgtaaaccgttacgaagtgcctcgtttcaaagaacacttgaagactcttcacaaattctatgaagctggctacattccaaaagacgtcgcaacaagcgatacttcctttgaccttcaacaagatacttggttcgttcgtgaagaaacagtaggaccagctgactacggtaacagcttgctttcacgtgttgccaacaaagatatccaaatcaaaccaattactaacttcatcaagaaaaaccaaacaacacaagttgctaactttgtcatctcaaacaactctaagaacaaagaaaaatcaatggaaatcttgaacctcttgaatacgaacccagaactcttgaacggtcttgtttacggtccagaaggcaagaactgggaaaaaattgaaggtaaagaaaaccgtgttcgcgttcttgatggctacaaaggaaacactcacatgggtggatggaacactggtaacaactggatcctttacatcaacgaaaacgttacagaccaacaaatcgaaaattctaagaaagaattggcagaagctaaagaatctccagcgcttggatttatcttcaatactgacaatgtgaaatctgaaatctcagctattgctaacacaatgcaacaatttgatacagctatcaacactggtactgtagacccagataaagcgattccagaattgatggaaaaattgaaatctgaaggtgcctacgaaaaagtattgaacgaaatgcaaaaacaatacgatgaattcttgaaaaacaaaaaataatcagctaaattgatttcgtgtattcattcctaactcctaaaataagaatcactgctttcctcaggttggtctggggagggcagtggtttttttggcacaaggatatagatatccatgttttctcttgtccttattttaaccattcaagaaatttcgagaaccctctacaatttccagtcaaataaattgcattcgttttctcaagcaggtatactagtgtagataaataaaaaatttagaaaatttaagaatagaaaagagaacaaatcttatggcaaaagatattcgtgtcttactttactacctttatactccaattgaaaatgcagagcaatttgctgcagaccacttggctttctgtaaatcaatcggccttaaaggccgtatcctagtcgctgacgagggaattaacggaacagtttcaggtgactatgaaacaactcaaaaatacatggactacgttcacagccttccaggaatggaagaactctggttcaagattgacgaagaaaatgaacaagccttcaagaagatgtttgttcgctacaagaaagaaattgtccaccttggtttggaagacaacgactttgacaatgacatcaacccacttgaaacaacaggtgcttacttgtctccaaaagagttcaaagaagcgcttcttgataaagataccgttgtccttgacacacgtaacgattatgagtacgacctaggacatttccgtggagctattcgcccagatattcgcaacttccgtgagttaccacaatgggtccgtgataacaaggaaaaattcatggacaagcgtgtcgtggtttactgtacaggtggcgttcgctgtgagaaattctcaggctggatggtccgtgaaggctacaaagatgtcggccaattgcacggaggaatcgcaacttacggtaaagacccagaagttcaaggtgagctttgggatgggaaaatgtacgtctttgacgagcgtattgccgttgatgtcaaccatgtcaacccaactatcgtagggaaagactggtttgatggaacaccatgtgaacgttatgtcaactgtggaaatccattctgtaaccgtcgtatcttgacatcagaagaaaatgaagacaagtaccttcgtggatgctcacacgagtgccgtgttcacccacgtaaccgctatgtttcaaaaaatgaattgacacaagctgaagttatcgagcgcctagccgctatcggtgaaagcttggatcaagcagctactgtataagatcaaacagtcctcaggggctgtttttctatgctttgtactcaaaaatctaatactcaatgaaaatcaaagagcaaactaggaagctagctgcaggctgctcaaagcactgctttgaggttgtagataagactgacgaagtcagttacatatatctacggcaaggcgaagctgacgcggtttgaagagattttcgaagagtataaagtttgtttttgtatctttcagaaaaataaggtatactgtatgtaaacgatttcaaaggagtccagttatggcgaaaacattttttattccaaataaacagagcattttaggagaacaagagattttgaatgccaagtcgatcttggccttgctagacggtttggagtcacatagctatgatgtagtctatctccgtcagcctcttaatcgtctcgaatatatcgagtgtgcgatagtggggcaatcacaatttctctttaaggtcagttatgctgatggtcaaaaggcttaccgtgtcgatcttcctgacctactaacaaagacagactggcagattatcaagtcatttttagatgctttgcttgcttatacagggactgatattgaagggctagatggttttgattttgaagcttatttccaagcaagtattcaagcctatctagcagaccctgtagctcgttttacgatttgccaaggaatttttaatcctattttctttagtcgtgagaacttgaaaagctttttagaggcagatggcttggctcagtttgaagcgcgtgtgcgtgcggttcaagagacagatgcctactttgcgagagtttccttctatcaggatggagaaggaaaagtgcatggcgtttaccatctagctcaaggagtcaagacagttttaccgagagaaccgtttgttcctgcagcctatattgagcaattggtggataaggaagtccagtgggagattgacttggttcaaatcacaggagatggctctaaaccagaagactatgaagccattgctcgcttggactatgcaaaattcttagaggtattacccccatctttttaccaccaactagacgccaatcaaatagaagtgcaacccatattagacaaagattttaaaacattagcacaagaaaagtaaagcagaagcaggtcaatcgacttgcttttttgacatagaaaaaatcctgccaaggatgacaggattgctactcaatgaaaatcaaagagcaaactaggaagctagccgcaggctgtacttgagtacggtaaggcgaagctgacgtggtttgaatttgatttttgaagagtatgaagtttaaagaaaggccaagatacgaagataatctccaatcagtgccacttcagctacaaagaagaggaggataataactccgttcacaaggacagacaagaataattgatagaaggagtcggtttcacttgcttgacttggtcttgtaatgatatggagactggcaagcagaatgattccaatgctaatcacacacaagagggctgtaaatcgtaggctatcaaagaaagcaaagaaactagcaatagcagtgaggaagattggaattgccaagagttgactatattgttggagaaccttgtctagcgtccagtccttttcctggtggataaatcgtctcacaacgaaactacccaagaggaatgaaaagaagaagagtgttgtcgctactaggatagagatgatagaaaaaagagttaaaggagctagctgctcagggaagcgactgttaatgcttgctatatgtccatagtaagcatgtttgatgtgatagatactaaagaaaaaggaagatgcagaaaacagaatgagcaagagaaaggctgtgtaactgtgtgtgatacttgtttccaacttacttgtaggagatttgatcgcttccactagccaagaccaaaaatcaagcacttgctctttccatttatccctagattttggagcttggtcggggatataaggactttctaaagatttactgataagaagtggctctttcgtggttgctttttgctgaggaagagcttcttggctctcttcagctatagtgactttttctgtttctttagaaaggtctggctcttcttcagtagaattagatgccttcttttcttctatttctgttctcgcttcactgtcttcaggagcttcaattttctcttcttgctggctttccaattcgacttcagcttgagggacttcctcctctaactgagtatttttttcaattggtgtatcgagatcggctatcgtttcttcagccttgtctgcaacctcttgagcttgctcttcaggcttgttcttgcttgttgtttttacaaaatcattactttcaaaccattcttgtttcatggtagaacctcctttttagttagataaatatgtttccatagtagcaaatgtaagcgtttttgtcaacgtctgcttggtgtggatattagatcaatattatcatcagatctcgcaatgagttgatccttgacatcggttttttcagttttgtaagggttgcttaattccgtacctcttgattcaggcttttctcttgtgaattggaagatagaaccatagttgcttgagatgtcccagttaattcgttggctttctttctggtctaggatgattctgagataatctttggcagtcagttcaaccttgccatggacttggatattttcagcgtggaagtgattctctgttgactctagctgactatctgtaagaactgtatcaaagatattaacgatattgggcgttgtgagtttactgtttttgatacgacttccttcaattcggaggatatagctgtttgtattgagggtcgcattttcaaggctagcatttatgatggtggtttgtccgcgattggctgagatgttgatcccttttagagttctcccttttggtagtcggagaataacttcttcaaaacgactagagtagctacttgcgatatgaagaatcccaccaattccagaagagagaaacggagtttcagacagtttcttatcagtgagactcagagttctatcgttctgattggtgataagatcatggtgagcagaaagagatggatggtaagaaatgtggatttgatcatcgaaagagtctgtgatggtgagcgtgtgttggtggagagtaatttctaggttttcgacttccttgccaaaggttagcttttccgtacggctatcatagacaggttctttggacatggaaagtaggctcttaatcccgtcagattggatacctacaaaaagcaggataaagccgataacggtagtcaccacaccaaagatgagaaatccttttgtccatttacgcatgctgattacctctctttccttttttaagaacaaattgtaccagacgaacaatgagtagaccgaagaagcgagttgcataggaaatgccaagtaaaactagcgaagaagcaccgatagccagtaaaccagaaccaaaaatcaagataaaggctgatttggcttgggcgaggacagtgaaactttcaactaaaaataggaatccgccgatgatacccagtatggaaactgcaaagaaagccagaatgacagtcaaagcggctacaagaattgcgaacagggtcacgaggatggcgattcccagaggaatgccgataggtgctgcaaggagggctaacaaggcgatatgtaaaatttgtcggttatttttttgagcgggtgcttcattgatttttttatcgagaagattggatagaacttcgtgggccgcttctttgggagttcccaaactagcgatgagttcttcttctccttcgactccagcatcgtcaaagagctctctgaaatagtccatggcttcgatacggtcagcttcaggtagtttcttgagatagagttctagctgagtcaggtattcagttcttgtcatggcggatactcccttctatgatgccattgatggtgtctgtatagagtgcccattcatcttttagggtcaagagctgctctataccaccgtttgtcaaggagtagtatttgcgcatgcgaccttggaactctctagaataggttgtcagaaagctattgccttccaattttttgagaatgggatagagtgtggattctttgatattagcgatcagcttaatggtttggctaatctcataaccataagaatcaccctgctccagtacagccaagatgagaaattcaatcaaggcagaggatgttggaaagtacatgggaaacctccttttctaatgtgtaagatttttatatataatttttctacacatacattgtacatctaaaagaaagccctgtcaagagaaatgtgtaaaatttttatatataaaaaacttctagctaaaactagaagtttaaaggatcttatccgctctgtccactgtaaagagggccacagtcatcaggatatcgatgagcaagagggcagctacagatggtacccaagagtggaacaggtcaaaactgtaaccaaagagggttggcccaaaggctgctaggatatagcctcctgtttgagataggccggacaattgggctgtcttttcaggggcgcttgtcttgagtgaaaagttgaccatgagataagggaagagggcactggttgcggttccgatgaggagatggatggcaagccagtaaatgaaattattgattgggaaaaagagcatggaaatgccgaccacaccagctagtgaaaccagagtgagcatgagctgacggttgcgagtagataaactggttgtcaggcttgggatggtcattgaaaaaggaatgctaatcagagataagatagaagtcagcaagccagcttcgtgactggatagacctgcatggatagacatggtaggtaaccaggtcatgacggtgtaaaagatcaaggattgaaaacctgaaaagataataattgcccaaacctgtttattacgcatgacctttatttgacttttttgtttggtttgtggagctagtctatgattatagcggtgatttgggagccagaccaaaaaagttgctagacagagtaacgtgaggagaaggataagtcctttccaagaactggcttgtgtaatgggcacagctagataggaagccagagccgttgcaatccccatagacgttacatataaggtggtcagaaaaccaattttctttggttgattggcttggataagactaggaagcaggacattgatgactgcgacacttgccccaaccatcaaggttcctagatagagcaggggcagattgattagtcgaataagtgagccgatggtcaagaagaagaggctgtaggtgaagagatgctccaagccgattttctgagccagttgggtagaaaatggtgaaaagagggtaaacataaggagaggcaggctggtcaagacaccaagcgaactaacttctacctccagaccttgcgaaatatttcccaaaataatgggtaaaacagtaaaaggagttcgcaaggaaacaccaatcaggataatacctggaacaaaaaagagtgattgctttttcatataatacctcttctagctgattttaataacagcttattttaaggctttttcactataatgtcaagtaaggtttctggctttcaagataaaaatgggaaagtcttgaaaattatgatagaatggtggaaggaaaaattcaggagagtagtagtgactcaaaatgttgaaagtcttctcgtatccattgtaatcagtgcatacaatgaagaaaaatatctgcctggtctaattgaagacttaaaaaatcaaacctatcctaaagaggatattgaaattctatttataaatgctatgtccacagatgggaccacagctatcattcagcaatttataaaggaagatacagagtttaactcaattagattgtataacaatcctaagaaaaatcaagctagtggttttaacctgggagttaaacattctgtaggggaccttattttaaaaattgatgctcattcaaaagttactgagacttttgtaatgaacaatgtggctattattcaacaaggtgaatttgtctgtggggggcctagaccgacgattgtcgaaggaaaaggaaaatgggcagagaccttgcatcttgttgaggaaaatatgtttggcagtagcattgccaattatcgaaatagttctgaggatagatatgtttcttctatttttcatggaatgtataaacgagaggttttccagaaggttggtttagtaaatgagcaacttggccgaactgaagataatgatattcattatagaattcgagaatatggttataaaatccgctatagcccaagtattctatcttatcagtatattcgaccaacattcaagaaaatgctgcatcaaaagtattcaaatggtttgtggattggcttgacaagtcatgttcagtttaagtgtttatcattatttcactatgttccttgtttatttgttttgagtcttgtgtttagtctagcattgttaccgatcacattcgtattcataactttactattaggtgcctattttctacttttgtcattactcactttgctgactttattaaaacataaaaatggatttctaattgtgatgccctttattttattttccattcactttgcttatggccttgggacgattgtaggtttaattagaggatttaaatggaagaaggagtacaagagaacaataatttatttggataaaataagccaaataaatcaaaatatgctataataacaatatagtaaaactcttttaaggaggagtagatttctatgaataaaaaactaacagattatgtgattgatctggtggaaattttaaataaacaacaaaagcaggttttctggggaatatttgatattttcagtatggtggtttccatcattgtatcttatattttattttatgggctgattaatccagcacctgttgactacattatctatacgagtttggccttcctgttctatcaattgatgattggtttttgggggttgaacgcgagcattagtcgttacagcaagattacggatttcatgaaaatcttttttggtgtgactgctagcagtgtcttgtcatatagtatctgttatgccttcttgccactcttctccatccgtttcatcattctctttatcttgttgagtaccttcttgattttattgccacggattacttggcagttaatctactccagacgcaaaaaaggtagtggtgatggagaacaccgtcggaccttcttgattggtgccggtgatggtggggctctttttatggatagttaccaacatccaaccagtgaattagaactggtcggtattttggataaggattctaagaaaaagggtcaaaaacttggtggtattcctgttttgggctcttatgacaatctgcctgaattagccaaacgccatcaaatcgagcgtgtcatcgttgcgattccgtcgctggatccgtcagaatatgagcgtatcttgcagatgtgtaataagctgggtgtcaaatgttacaagatgcctaaggttgaaactgttgttcagggccttcaccaagcaggtactggcttccaaaaaattgatattacggaccttttgggtcgtcaggaaatccgtcttgacgaatcgcgtctgggtgcagaactgacaggtaagaccatcttagtcacaggagctggaggttcaatcggttctgaaatctgtcgtcaagttagtcgcttcaatcctgaacgcattgtcttgctcggtcatggggaaaactcaatctaccttgtttatcatgaattgattcgtaagttccaagggattgattatgtacctgtgattgcggacattcaagactatgatcgtttgttgcaagtctttgagcagtacaaacctgctattgtttatcatgcggcagcccacaagcatgttcctatgatggagcgcaatccaaaagaagccttcaaaaacaatatccgtggaacttacaatgttgctaaggctgttgatgaagctaaagtgtctaagatggttatgatttcgacagataaggcagtcaatccaccaaatgttatgggagcaaccaagcgcgtggcggagttgattgtcactggctttaaccaacgtagccaatcaacctactgtgcagttcgttttgggaatgttcttggtagccgtggtagtgtcattccagtctttgaacgtcagattgctgaaggtgggcctgtaacggtgacagacttccgtatgacccgttactttatgaccattccagaagctagccgtctggttatccatgctggtgcttatgccaaagatggggaagtctttatccttgatatgggcaaaccagtcaagatttatgacttggccaagaagatggtgcttctaagtggccacactgaaagtgaaattccaatcgttgaagttggaatccgcccaggtgaaaaactctacgaagaactcttggtatcaaccgaactcgttgataatcaagttatggataagattttcgttggtaaggttaatgtcatgcctttagaatccatcaatcaaaagattggagagttccgcactctcagtggagatgagttgaagcaagctattatcgcctttgctaatcaaacaacccacattgaataaaaaagaaaaacgcatagtatcaagttacacaaccttggtaatatgcgttttattatgtagagacttatactcttcgaaaatctcttcaaaccacgtcaacgtcgccttgccgtatatggttactgacttcgtcagttctatccacaacctcaaaacagtgttttgagctgacttcgtcagttctatccacaacctcaaaacagtgttttgagctgacttcgtcagttctatccacaacctcaaaacagtgttttgagctgacttcgtcagttccatccacaaccttaaaacagtgttttgagctgacttcgtcagttccatctacaaccttaaaacagtgttttgagctgcccgcagctagtttcctagtttgctctttgattttcattgagtattacttcattttcttctgaaatggaattgttacccagtctatgctattgaaaatacgccaaaacttctaagggtttgtgagcgatataatcaggttgatagtttagtagatctgcttgctctccaaatccccaagtgatggccaatttctgaatacctgtttctcgagctcccagcatatcaaacttggtatctccgatgatgatggcttgttctggtgctagttgatgtgtctgcaaggcttggtgaatgacatctgccttatggggtgcttcagggctagaaccataaatgccatcaaagaaatgatggatttccaagttttttgccatgtcttgagcagtagatgtatcctttgtcgtggtgatgtagagtggataactgctcgataactcctcaagcaagtctataatctgaggaaagagttgagcttcatagatgccttttgccttatagtaagaacgatatatctgcacggcttcagaaatttggtctttggacaggcaggtcgcaaaactactttcgagaggtggtcccataaaaccacgaatagttttggcatcagggctaggcacccccagctctttaaaggtataggtaaaggcattgtgaatcccgatagaactatcaacgagggttccatccaaatcgaaaaaaatcgctgtgatagaggtcatggtttctcctatttgataagcttattctccgaaaatttctttttggaggcgacgaccagtaggggtggtagcgagtccaccttcagctgtttcacgaaaggcagttggcatgcttgctcctacttggtacatggcatcgatcacttcatccacagggattttagattcgatacctgccaaggccatgtctgctgcgatgaaagcaaagctagctcccatggcattacgtttgacacagggaacttcgaccaaacctgcaacagggtcacagatgaggcctagcatatttttaatgacaaaggcaatagcttgactggcctgataaggtgttccacctgcagccagagtcaaggcggcagcactcatagcagaggctgaaccaacttcagcttgacacccaccctcagcacctgagatggaggcattgtttgcgatgactagtccaaaggcaccagcagcaaagaggaaatccaattgttgctcgtggctgaggcctaatt
